(19) United States
(12) Patent Application Publication
(10) Pub. No.: US 2019/0388510 A1
(43) Pub. Date: Dec. 26, 2019

(54) GLUCAGON-T3 CONJUGATES

(71) Applicant: INDIANA UNIVERSITY RESEARCH AND TECHNOLOGY CORPORATION, Indianapolis, IN (US)

(72) Inventors: Richard D. DIMARCHI, Carmel, IN (US); Brian FINAN, Indianapolis, IN (US); Bin YANG, Plainfield, IN (US); Zhimeng ZHU, Wuhan, Hubei (CN)

(21) Appl. No.: 16/302,795

(22) PCT Filed: May 26, 2017
(86) PCT No.: PCT/US2017/034617

§ 371 Date: Nov. 19, 2018

Related U.S. Application Data
(60) Provisional application No. 62/344,664, filed on Jun. 2, 2016.

(51) Int. Cl. A61K 38/26; A61K 47/55; A61P 3/06; A61P 3/04; A61P 9/10; A61K 31/198

(52) U.S. Cl. CPC A61K 38/26; A61K 47/55; A61K 31/198; A61P 3/04; A61P 9/10; A61P 3/06

(57) ABSTRACT

Provided herein are glucagon agonist peptides conjugated with thyroid hormone receptor ligands that are capable of acting at the thyroid hormone receptor. Also provided herein are pharmaceutical compositions and kits of the conjugates of the invention. Further provided herein are methods of treating a disease, e.g., a metabolic disorder, such as diabetes, obesity, metabolic syndrome and chronic cardiovascular disease, comprising administering the conjugates of the invention.

### CROSS REFERENCE TO RELATED APPLICATIONS

[0001] This application claims priority to U.S. Provisional Patent Application No. 62/344,664 filed on Jun. 2, 2016, the disclosure of which is hereby expressly incorporated by reference in its entirety.

### INCORPORATION BY REFERENCE OF MATERIAL SUBMITTED ELECTRONICALLY

[0002] Incorporated by reference in its entirety is a computer-readable nucleotide/amino acid sequence listing submitted concurrently herewith and identified as follows: 531 kilobytes acii (text) file named “265652seqlist_ST25.txt,” created on May 18, 2017.

### BACKGROUND

[0003] Homeostatic control of plasma and cellular lipids is crucial for maintaining proper health. Dyslipidemia, including hypercholesterolemia and hypertriglyceridemia, represents a hallmark of the metabolic syndrome and triggers a host of obesity comorbidities. Coordinated impairments in hepatic lipid metabolism and diminished capacity of adipocytes to properly store lipids lead to lipid spillover with ectopic fat deposition in susceptible organs. Liver and adipose tissues orchestrate systemic lipid homeostasis and reciprocal dysfunction in these organs propels a vicious cycle of metabolic derangements. Notably, hepatic steatosis is a key pathogenic factor in hepatic insulin resistance and non-alcoholic fatty liver disease (NAFLD), and perturbed cholesterol handling accelerates atherosclerosis, thus positioning dyslipidemia at the interface of type 2 diabetes (T2D) and coronary heart disease (CHD). Importantly, CHD remains the leading cause of death globally and T2D is now recognized as an independent CHD-risk-equivalent condition.

[0004] Inhibiting hepatic cholesterol synthesis via statins provides clinically relevant reductions in circulating cholesterol and proportionally lowers CHD risk. However, a considerable number of patients still fail to meet target reductions in cholesterol. Furthermore, a significant limitation of statin therapy is its near exclusive focus on cholesterol lowering with no benefit to glycemic control or body weight. Therefore, a pharmacological agent that lowers cholesterol, triglycerides, glucose, hepatic fat and body weight would offer a transformative advancement for treatment of the metabolic syndrome that should decrease mortality risk from cardiovascular events.

[0005] Thyroid hormones powerfully influence systemic metabolism through multiple pathways, with profound effects on energy expenditure, fat oxidation, and cholesterol metabolism. Clinical reports revealed sixty years ago that administration of thyroid extracts reduced circulating cholesterol and reversed obesity. However, adverse side effects of thyroid hormone treatment include increased heart rate, cardiac hypertrophy, muscle wasting, and reduced bone density, terminating its clinical use.

[0006] Discovery of thyromimetics capable of separating lipid metabolism benefits from adverse cardiovascular effects has remained a desire for patients, physicians and the pharmaceutical industry. Human genomic data and studies in isoform-specific knockout mice have suggested that thyroid hormone receptor alpha (TRα) mediates the hypertrophic cardiovascular actions of thyroid hormones while thyroid hormone receptor beta (TRβ) promotes hepatic lipid metabolism, and both isoforms mediate lipolysis and thermogenesis in adipose tissues. This knowledge has initiated attempts to rationally design small molecules with selective preference for TRβ compared to TRα for the purpose to treat dyslipidemia. Second generation thyromimetics sought isoform specificity and tissue-specific function by derivatization with chemical moieties to promote tissue selectivity. These functionalized adducts sought to promote the interaction with liver-specific transporters or were designed to take advantage of hepatic first-pass metabolism to release an active thyromimetic. These liver-targeted thyromimetics initially showed promising pre-clinical effects on handling hepatic lipids and atherogenic lipoproteins.

[0007] Glucagon is classically known as the insulin-opposing hormone that induces hepatic glucose production to buffer against hypoglycemia and maintain proper glucose homeostasis. Exogenous glucagon administration also offers many benefits for metabolic diseases independent from its glycemic effects. Studies more than 50 years ago first demonstrated liver-mediated effects of glucagon to lower circulating cholesterol and triglycerides in rodents and humans. Furthermore, glucagon directly influences hepatic fat metabolism. The benefits of glucagon action are not solely constrained to the liver as adipose tissue is a secondary target organ for glucagon action. In white adipose tissue, glucagon promotes lipolysis and increases energy expenditure through thermogenic mechanisms. These lipolytic and thermogenic actions demonstrate the validity of glucagon-based agonists as an anti-obesity therapy, but only if the inherent diabetogenic liability can be properly controlled.

[0008] In accordance with the current disclosure, compositions are provided wherein the liver-mediated lipid lowering properties of glucagon, as well as the adipose-mediated thermogenic properties of glucagon are combined with thyroid hormone activity in a single complex. Liver directed T3 action offsets the diabetogenic liability of glucagon, and glucagon-mediated delivery spares the cardiovascular system from adverse T3 action. The therapeutic utility of glucagon and thyroid hormone pairing provides a new approach in treatment of obesity, type 2 diabetes, and cardiovascular disease.

### SUMMARY

[0009] Applicants disclose compositions and methods for glucagon-mediated selective delivery of thyroid hormone action to the liver as a primary target and to inguinal white fat (iWAT) as a secondary target. Together, coordinated glucagon and thyroid hormone actions synergize to correct hyperlipidemia, reverse hepatic steatosis and lower body weight through liver and fat-specific mechanisms. Importantly, the liver-directed thyroid hormone action overrides the diabetogenic liability of local glucagon action resulting in a net improvement of glycemic control, while glucagon-mediated delivery spares adverse action of thyroid hormone on the cardiovascular system.

[0010] Provided herein are chemical conjugates of a glucagon agonist peptide and compounds having thyroid hormone activity (“glucagon/T3 conjugates”). These conjugates with plural activities are useful for the treatment of a variety of diseases including hyperlipidemia, metabolic syndrome, diabetes, obesity, liver steatosis, and chronic cardiovascular disease. Advantageously, the disclosed conjugates lack the adverse effects on the cardiovascular system that are associated with T3 administration and also lack the adverse effect of elevated blood glucose that are associated with the administration of glucagon. The glucagon/T3 conjugates of the present disclosure can be represented by the following formula:

Q-L-Y

[0011] wherein Q is a glucagon agonist peptide, Y is a thyroid hormone receptor ligand, and L is a linking group or a bond. In accordance with one embodiment Q is a glucagon agonist peptide that exhibits agonist activity at the glucagon receptor. In some embodiments, the glucagon agonist peptide is a fusion peptide wherein a second peptide has been fused to the C-terminus of the glucagon peptide. The thyroid hormone receptor ligand, (Y) is wholly or partly non-peptide and acts at the thyroid receptor. In some embodiments Y is a compound having the general structure

[chemical structure]

[0012] wherein

[0013] R₁₅ is C₁-C₄ alkyl, —CH₂(C₆ heteroaryl), —CH₂(OH)(C₆ aryl)F, —CH(OH)CH₃, halo or H

[0014] R₂₀ is halo, CH₃ or H;

[0015] R₂₁ is halo, CH₃ or H;

[0016] R₂₂ is H, OH, halo, —CH₂(OH)(C₆ aryl)F, or C₁-C₄ alkyl; and

[0017] R₂₃ is —CH₂CH(NH₂)COOH, —OCH₂COOH, —NHC(O)COOH, —CH₂COOH,

[0018] —NHC(O)CH₂COOH, —CH₂CH₂COOH, —OCH₂PO₃²⁻, —NHC(O)CH₂COOH, OH, halo or C₁-C₄ alkyl. In one embodiment Y is a compound selected from the group consisting of thyroxine T4 (3,5,3′,5′-tetra-iodothyronine), and 3,5,3′-triiodo L-thyronine.

[0019] In one embodiment the glucagon agonist peptide (Q) comprises the sequence

[0020] X₁X₂X₃GTFTSDYSX₁₂YLX₁₅SRRAQX₂₁FVX₂₄WLX₂₇X₂₈X₂₉ (SEQ ID NO: 925)

[0021] wherein

[0022] X₁ is selected from the group consisting of His, D-His, N-methyl-His, alpha-methyl-His, imidazole acetic acid, des-amino-His, hydroxyl-His, acetyl-His, homo-His, or alpha, alpha-dimethyl imidiazole acetic acid (DMIA);

[0023] X₂ is selected from the group consisting of Ser, D-Ser, Ala, D-Ala, Gly, N-methyl-Ser, amino isobutyric acid (Aib), Val, or α-amino-N-butyric acid;

[0024] X₃ is an amino acid comprising a side chain of Structure I, II, or III:

[chemical structure]

[0025] wherein R¹ is C₀₋₃ alkyl or C₀₋₃ heteroalkyl; R² is NHR⁴ or C₁₋₃ alkyl; R³ is C₁₋₃ alkyl; R⁴ is H or C₁₋₃ alkyl; X is NH, O, or S; and Y is NHR⁴, SR³, or OR³;

[0026] X₁₂ is Lys or Arg;

[0027] X₁₅ is Asp, Glu, cysteic acid, homoglutamic acid or homocysteic acid;

[0028] X₂₁ is Asp, Lys, Cys, Orn, homocysteine or acetyl phenylalanine;

[0029] X₂₄ is Gln, Lys, Cys, Orn, homocysteine or acetyl phenylalanine;

[0030] X₂₇ is Met, Leu or Nle;

[0031] X₂₈ is Asn, Lys, Arg, His, Asp or Glu; and

[0032] X₂₉ is Thr, Lys, Arg, His, Gly, Asp or Glu, optionally wherein SEQ ID NO: 925 is further modified by one, two, three, or all of the amino acids at positions 16, 20, 21, and 24 being substituted with an α,α-disubstituted amino acid.

[0033] In some aspects of the invention, pharmaceutical compositions comprising the Q-L-Y conjugate and a pharmaceutically acceptable carrier are also provided.

[0034] In other aspects of the present disclosure, methods are provided for administering a therapeutically effective amount of a Q-L-Y conjugate described herein for treating a disease or medical condition in a patient. In some embodiments, the disease or medical condition is selected from the group consisting of metabolic syndrome, diabetes, obesity, liver steatosis, and chronic cardiovascular disease. In one embodiment the glucagon-T3 conjugates are administered to a patient to treat metabolic syndrome and lipid abnormalities of the liver, including for example non-alcoholic steatohepatitis (NASH).

[0035] In one embodiment the therapeutic index of the glucagon-T3 conjugates is enhanced by linking a self-cleaving dipeptide to the active site of the glucagon agonist peptide or the thyroid hormone receptor ligand component of the conjugate. Subsequent removal of the dipeptide under physiological conditions and in the absence of enzymatic activity restores full activity to the Q-L-Y conjugate. Advantageously, the dipeptide will chemically cleave (in the absence of enzymatic activity) under physiological conditions at a rate determined in part by the substituents on the dipeptide. In one embodiment the conjugate Q-L-Y is modified by the covalent linkage of one or more dipeptides (A-B) to an amine of Q or Y, wherein A is an amino acid or a hydroxy acid and B is an N-alkylated amino acid linked to Q or Y through an amide bond between a carboxyl moiety of B and an amine of Q and/or Y. In one embodiment both Q and Y are linked to a dipeptide A-B. In one embodiment, A-B comprises the structure:

[chemical structure]

wherein

[0036] (a) R¹, R², R⁴ and R⁸ are independently selected from the group consisting of H, C1-C18 alkyl, C2-C18 alkenyl, (C1-C18 alkyl)OH, (C1-C18 alkyl)SH, (C2-C3 alkyl)SCH₃, (C1-C4 alkyl)CONH₂, (C1-C4 alkyl)COOH, (C1-C4 alkyl)NH₂, (C1-C4 alkyl)NHC(NH₂⁺)NH₂, (C0-C4 alkyl)(C3-C6 cycloalkyl), (C0-C4 alkyl)(C2-C5 heterocyclic), (C0-C4 alkyl)(C6-C10 aryl)R⁷, (C1-C4 alkyl)(C3-C9 heteroaryl), and C1-C12 alkyl(W1)C1-C12 alkyl, wherein W1 is a heteroatom selected from the group consisting of N, S and O, or
[0037] (ii) R¹ and R² together with the atoms to which they are attached form a C3-C12 cycloalkyl or aryl; or
[0038] (iii) R⁴ and R⁸ together with the atoms to which they are attached form a C3-C6 cycloalkyl;

[0039] (b) R³ is selected from the group consisting of C1-C18 alkyl, (C1-C18 alkyl)OH, (C1-C18 alkyl)NH₂, (C1-C18 alkyl)SH, (C0-C4 alkyl)(C3-C6)cycloalkyl, (C0-C4 alkyl)(C2-C5 heterocyclic), (C0-C4 alkyl)(C6-C10 aryl)R⁷, and (C1-C4 alkyl)(C3-C9 heteroaryl) or R⁴ and R³ together with the atoms to which they are attached form a 4, 5 or 6 member heterocyclic ring;

[0040] (c) R⁵ is NHR⁶ or OH;

[0041] (d) R⁶ is H, C₁-C₈ alkyl; and

[0042] (e) R⁷ is selected from the group consisting of H and OH

[0043] wherein the chemical cleavage half-life (t_{1/2}) of A-B from Q and/or Y is at least about 1 hour to about 1 week in PBS under physiological conditions.

### BRIEF DESCRIPTION OF THE DRAWINGS

[0044] FIGS. 1A-1K. Glucagon/T3 Improves Dyslipidemia and Ameliorates Atherosclerosis in Western Diet-Fed Mice

Effects on levels of T3 deposited in the liver (FIG. 1A), plasma levels of total cholesterol (FIG. 1B), cholesterol bound to different lipoprotein fractions (FIG. 1C), triglycerides (FIG. 1D; column 1, vehicle; column 2, glucagon; column 3, T3 and column 4, glucagon/T3), hepatic cholesterol (FIG. 1E; column 1, vehicle; column 2, glucagon; column 3, T3 and column 4, glucagon/T3), liver H & E staining and steatosis scoring (FIG. 1F), hepatic mRNA expression of select targets (FIG. 1G; solid bar, vehicle; open bar, glucagon; shades bar, T3 and cross hatched bar, glucagon/T3), and plasma levels of FGF21 from HFHCD fed male C57B16j mice (FIG. 1H) following daily subcutaneous injections of vehicle, a glucagon analog, T3, or glucagon/T3 at a dose of 100 nmol kg-1 for 14 days (n=8). Effects on plasma levels of total cholesterol (FIG. 1I), cholesterol bound to different lipoprotein fractions (FIG. 1J), and atherosclerotic plaque coverage expressed as the percentage of oil-red 0 positive area per total area in the aortic root (FIG. 1K) following daily subcutaneous injections of vehicle or glucagon/T3 at a dose of 100 nmol kg-1 for 14 days (n=10). *p<0.05, **p<0.01, and ***p<0.001 comparing effects following compound injections to vehicle injections. All data are presented as mean±SEM.

[0045] FIGS. 2A-2D. Lipid Improvements of Glucagon/T3 Require GcgR and THRβ

Effects on plasma levels of (FIG. 2A) total cholesterol and (FIG. 2B) triglycerides from HFHSD-fed global GcgR−/− male mice following daily subcutaneous injections of vehicle or glucagon/T3 at a dose of 100 nmol kg-1 for 7 days (n=7-9). Effects on plasma levels of (FIG. 2C) total cholesterol and (FIG. 2D) triglycerides from western diet-fed Alf-THRβ−/− male mice following daily subcutaneous injections of vehicle or glucagon/T3 at a dose of 100 nmol kg-1 for 7 days (n=5-7). *p<0.05, **p<0.01, and ***p<0.001 comparing effects following compound injections to vehicle injections within each genotype.
All data are presented as mean±SEM.

[0046] FIGS. 3A-3D. Unbiased Transcriptional Profiling of Livers from Treated Mice RNA-seq analysis of livers from HFHCD-fed C57BL/6j male mice (n=4) following 14 days of daily treatment with vehicle, a glucagon analog, T3, the equimolar co-administration of the glucagon analog and T3, and the glucagon/T3 conjugate. (FIG. 3A) Overlap of genes significantly regulated (>2-fold change) by the different treatment groups compared to vehicle controls. (FIG. 3B) Top pathways enriched in the liver by treatment with glucagon/T3 with associated −log 10 P values. Each dot displays one significant regulated gene/transcript mapped to the Pathway shown (yaxis). The log 2-FC is indicated by the x-axis. Size of the dots on the far right corresponds to the negative log 10(p-value) for the enrichment. (FIG. 3C) Comparison of the magnitude of the fold change in transcription between similar genes regulated by both T3 alone and glucagon/T3. (FIG. 3D) Magnitude of the fold change in transcription between targets that are regulated in the same direction by both the co-administration of glucagon and T3 compared to glucagon/T3. To detect for synergistic like effects, we calculated a synergy score (SS, see methods/results for details) for each expressed transcript and found 208 synergistic targets. For each target the log 2FC for treatment with glucagon+T3 co-administration and glucagon/T3 is shown.

[0047] FIG. 4A-4K. Glucagon/T3 Increases Energy Expenditure and Lowers Body Weight in DIO Mice

Effects on body weight change (FIG. 4A), body composition (FIG. 4B), cumulative food intake (FIG. 4C), longitudinal energy expenditure (FIG. 4D), cumulative locomotor activity (FIG. 4E), plasma levels of T3 (FIG. 4F), rectal temperature (FIG. 4G), and average RER (FIG. 4H) during the light and dark phase during a 24 hour period between days 2 and 3 of treatment from HFHSD-fed male C57B16j mice following daily subcutaneous injections of vehicle, a glucagon analog, T3, or glucagon/T3 at a dose of 100 nmol kg-1 for 7 days (n=8). Effects on body weight change (FIG. 4I), longitudinal energy expenditure (FIG. 4J), and average RER during the light and dark phase (FIG. 4K) during a 24 hour period between days 2 and 3 of treatment from HFHSD-fed global GcgR−/− male mice or wild-type controls following daily subcutaneous injections of vehicle or glucagon/T3 at a dose of 100 nmol kg-1 for 7 days (n=7-9). *p<0.05, **p<0.01, and ***p<0.001 comparing effects following compound injections to vehicle injections within comparable genotypes. All data are presented as mean±SEM.

[0048] FIGS. 5A-5F. Glucagon/T3 Induces Browning of iWAT and Full Weight-Lowering Efficacy Depends on UCP-1 Mediated Thermogenesis

Effects on levels of T3 deposited in iWAT (FIG. 5A), iWAT H & E staining (FIG. 5B), and iWAT mRNA expression of select targets (FIG. 5C), following daily subcutaneous injections of vehicle, a glucagon analog, T3, or glucagon/T3 at a dose of 100 nmol kg-1 for 14 days (n=8). Effects on body weight change (FIG. 5D), average RER during the light and dark phase (FIG. 5E) during a 24 hour period between days 2 and 3 of treatment, and longitudinal energy expenditure from HFHSD-fed global Ucp1−/− male mice (FIG. 5F) or wildtype controls maintained at 30° C. following daily subcutaneous injections of vehicle or glucagon/T3 at a dose of 100 nmol kg-1 for 7 days (n=4-7). *p<0.05, **p<0.01, and ***p<0.001 comparing effects following compound injections to vehicle injections. All data are presented as mean±SEM.

[0049] FIG. 6A-6I. The T3 Action of Glucagon/T3 Overpowers the Hyperglycemic Effects of Glucagon

Effects on fasted blood glucose through 120 min and ad libitum-fed blood glucose at 16 h from HFHSD-fed male C57B16j mice (FIG. 6A) following a single subcutaneous injection of vehicle, a glucagon analog, T3, or glucagon/T3 at a dose of 100 nmol kg-1 (n=8). Effects on intraperitoneal glucose tolerance (1.5 g kg-1) (FIG. 6B), intraperitoneal insulin tolerance (0.75 IU kg-1) (FIG. 6C), plasma levels of insulin (FIG. 6D), intraperitoneal pyruvate tolerance (1.5 g kg-1) at the indicated days from HFHSD-fed male C57B16j mice (FIG. 6E) following daily subcutaneous injections of vehicle, a glucagon analog, T3, or glucagon/T3 at a dose of 100 nmol kg-1 (n=8). Acute effects on RER during the light phase of the second day of treatment from HFHSD-fed male C57B16j mice (FIG. 6F) immediately following a subcutaneous injection of vehicle, a glucagon analog, T3, or glucagon/T3 at a dose of 100 nmol kg-1 (n=8). Effects on plasma levels of free fatty acids from HFHSD-fed male C57B16j mice (FIG. 6G) following a single subcutaneous injection of vehicle, a glucagon analog, T3, or glucagon/T3 at a dose of 100 nmol kg-1 (n=8). Effects on hepatic mRNA expression of select targets indicative of glucose metabolism (FIG. 6H) and the PGC-1 axis from HFHCD-fed male C57B16j mice (FIG. 6I) following daily subcutaneous injections of vehicle, a glucagon analog, T3, or glucagon/T3 at a dose of 100 nmol kg-1 for 14 days (n=8). *p<0.05, **p<0.01, and ***p<0.001 comparing effects following compound injections to vehicle injections. All data are presented as mean±SEM.

[0050] FIGS. 7A-7I. Glucagon/T3 is Devoid of Adverse Effects on Cardiac Function

Effects on heart rate (FIG. 7A), respiration rate (FIG. 7B), fraction shortening (FIG. 7C), ejection fraction (FIG. 7D), heart weight to tibia length ratio (FIG. 7E), left ventricular internal diameter at the end of diastole (FIG. 7F) and systole (FIG. 7G), and whole heart mRNA expression of T3-sensitive targets (FIG. 7H) and surrogate hypertrophic markers (FIG. 7I) from HFHSD-fed male C57B16j mice following daily subcutaneous injections of vehicle, a glucagon analog, T3, or glucagon/T3 at a dose of 100 nmol kg-1 (n=8) for 28 days. *p<0.05, **p<0.01, and ***p<0.001 comparing effects following compound injections to vehicle injections. All data are presented as mean±SEM. For each of the graphs, the solid bars represent vehicle; open bars represent glucagon; stippled bars represent T3 and cross hatched bars represent glucagon/T3.

[0051] FIG. 8 Presents the metabolic pathways for Thyroxine (T4).

[0052] FIG. 9 Presents the chemical structures of Triiodothyronine (T3) and various known analogs thereof.

[0053] FIG. 10 Presents the chemical structures of L-thyroxine and its enantiomer Dextrothyroxine which was used in an early clinical trial to treat dyslipidemia; as well as the chemical structures of various thyroxine analogs including the organ-selective analogs L-94901 and T-0681, and TRβ1-selective analogs GC-1, CGS23425, KB-141, DITPA, and MB07344, the active form of the prodrug MB07811.

[0054] FIG. 11 Presents the chemical structures of Triiodothyronine (T3) and various known analogs thereof.

[0055] FIGS. 12A-12E. Chemical Structures of Glucagon and T3 Conjugates.

Sequence, structure, molecular weight and GcgR activity of native glucagon (FIG. 12A; SEQ ID NO: 1), the glucagon analog used for creation of conjugates (FIG. 12B; SEQ ID NO: 934), glucagon/T3 (FIG. 12C; glucagon sequence=SEQ ID NO: 934), glucagon/iT3 (FIG. 12D; glucagon sequence=SEQ ID NO: 934), and glucagon/rT3 (FIG. 12E; glucagon sequence=SEQ ID NO: 934).

[0056] FIGS. 13A-13I. In Vitro Profiling of Glucagon/T3 Character, Constituent Receptor Activity, and Stability. Mass spectrometry confirming the identity of the glucagon analog (FIG. 13A), glucagon/T3 (FIG. 13B), glucagon/iT3 (FIG. 13C), and glucagon/rT3 (FIG. 13D). Receptor activity profiles of the conjugates at GcgR (FIG. 13E) and THR (FIG. 13F) using DR4-luciferase reporter assays. HPLC chromatograms of glucagon/T3 incubated in human plasma at 37° C. after 0 h (FIG. 13G), 6 h (FIG. 13H), and 24 h (FIG. 13I) exposure.

[0057] FIGS. 14A-14C. Glucagon/T3 Does Not Harm Tissue Function or Thyroid Hormone Endocrinology. Effects on plasma levels of ALT and AST (FIG. 14A), blood urea nitrogen (FIG. 14B) and creatinine from HFHCD-fed male C57B16j mice (FIG. 14C) following daily subcutaneous injections of vehicle, a glucagon analog, T3, or glucagon/T3 at a dose of 100 nmol kg-1 for 14 days (n=8).

[0058] FIGS. 15A-15C. Metabolic Efficacy of Different Glucagon/T3 Conjugate Versions. Effects on plasma levels of total cholesterol (FIG. 15A), triglycerides (FIG. 15B), and percent body weight loss from HFHSD-fed male C57B16j mice (15C) following daily subcutaneous injections of vehicle, equimolar co-administration of the glucagon analog and T3, glucagon/iT3, glucagon/rT3, or rT3 at a dose of 100 nmol kg-1 for 14 days (n=8). *p<0.05 and ***p<0.001 comparing effects following compound injections to vehicle injections. All data are presented as mean±SEM.

[0059] FIG. 16. Thermogenic gene program in classical BAT. Effects on the relative expression of selected theromegenic genes in BAT from HFHCD-fed male C57B16j mice following daily subcutaneous injections of vehicle or glucagon/T3 at a dose of 100 nmol kg.

### DETAILED DESCRIPTION

### Definitions

[0060] In describing and claiming the invention, the following terminology will be used in accordance with the definitions set forth below.

[0061] The term “about” as used herein means greater or lesser than the value or range of values stated by 10 percent, but is not intended to designate any value or range of values to only this broader definition. Each value or range of values preceded by the term “about” is also intended to encompass the embodiment of the stated absolute value or range of values.

[0062] As used herein the term “amino acid” encompasses any molecule containing both amino and carboxyl functional groups, wherein the amino and carboxylate groups are attached to the same carbon (the alpha carbon). The alpha carbon optionally may have one or two further organic substituents. For the purposes of the present disclosure designation of an amino acid without specifying its stereochemistry is intended to encompass either the L or D form of the amino acid, or a racemic mixture. The D isomer of native amino acids is indicated by a lower case “d” preceding the standard 3 letter amino acid code (e.g., dSer).

[0063] As used herein the term “non-coded amino acid” encompasses any amino acid that is not an L-isomer of any of the following 20 amino acids: Ala, Cys, Asp, Glu, Phe, Gly, His, Ile, Lys, Leu, Met, Asn, Pro, Gln, Arg, Ser, Thr, Val, Trp, Tyr.

[0064] A “bioactive polypeptide” refers to polypeptides which are capable of exerting a biological effect in vitro and/or in vivo.

[0065] As used herein a general reference to a peptide is intended to encompass peptides that have modified amino and carboxy termini. For example, an amino acid sequence designating the standard amino acids is intended to encompass standard amino acids at the N- and C-terminus as well as a corresponding hydroxyl acid at the N-terminus and/or a corresponding C-terminal amino acid modified to comprise an amide group in place of the terminal carboxylic acid.

[0066] As used herein an “acylated” amino acid is an amino acid comprising an acyl group which is non-native to a naturally-occurring amino acid, regardless by the means by which it is produced. Exemplary methods of producing acylated amino acids and acylated peptides are known in the art and include acylating an amino acid before inclusion in the peptide or peptide synthesis followed by chemical acylation of the peptide. In some embodiments, the acyl group causes the peptide to have one or more of (i) a prolonged half-life in circulation, (ii) a delayed onset of action, (iii) an extended duration of action, (iv) an improved resistance to proteases, and (v) increased potency at the IGF and/or insulin peptide receptors.

[0067] As used herein, an “alkylated” amino acid is an amino acid comprising an alkyl group which is non-native to a naturally-occurring amino acid, regardless of the means by which it is produced. Exemplary methods of producing alkylated amino acids and alkylated peptides are known in the art and including alkylating an amino acid before inclusion in the peptide or peptide synthesis followed by chemical alkylation of the peptide. Without being held to any particular theory, it is believed that alkylation of peptides will achieve similar, if not the same, effects as acylation of the peptides, e.g., a prolonged half-life in circulation, a delayed onset of action, an extended duration of action, an improved resistance to proteases and increased potency at the IGF and/or insulin receptors.

[0068] As used herein, the term “pharmaceutically acceptable carrier” includes any of the standard pharmaceutical carriers, such as a phosphate buffered saline solution, water, emulsions such as an oil/water or water/oil emulsion, and various types of wetting agents. The term also encompasses any of the agents approved by a regulatory agency of the US Federal government or listed in the US Pharmacopeia for use in animals, including humans.

[0069] As used herein the term “pharmaceutically acceptable salt” refers to salts of compounds that retain the biological activity of the parent compound, and which are not biologically or otherwise undesirable. Many of the compounds disclosed herein are capable of forming acid and/or base salts by virtue of the presence of amino and/or carboxyl groups or groups similar thereto.

[0070] Pharmaceutically acceptable base addition salts can be prepared from inorganic and organic bases. Salts derived from inorganic bases, include by way of example only, sodium, potassium, lithium, ammonium, calcium and magnesium salts. Salts derived from organic bases include, but are not limited to, salts of primary, secondary and tertiary amines.

[0071] Pharmaceutically acceptable acid addition salts may be prepared from inorganic and organic acids. Salts derived from inorganic acids include hydrochloric acid, hydrobromic acid, sulfuric acid, nitric acid, phosphoric acid, and the like. Salts derived from organic acids include acetic acid, propionic acid, glycolic acid, pyruvic acid, oxalic acid, malic acid, malonic acid, succinic acid, maleic acid, fumaric acid, tartaric acid, citric acid, benzoic acid, cinnamic acid, mandelic acid, methanesulfonic acid, ethanesulfonic acid, p-toluene-sulfonic acid, salicylic acid, and the like.

[0072] As used herein, the term “hydrophilic moiety” refers to any compound that is readily water-soluble or readily absorbs water, and which are tolerated in vivo by mammalian species without toxic effects (i.e. are biocompatible). Examples of hydrophilic moieties include polyethylene glycol (PEG), polylactic acid, polyglycolic acid, a polylactic-polyglycolic acid copolymer, polyvinyl alcohol, polyvinylpyrrolidone, polymethoxazoline, polyethyloxazoline, polyhydroxyethyl methacrylate, polyhydroxypropyl methacrylamide, polymethacrylamide, polydimethylacrylamide, and derivatised celluloses such as hydroxymethylcellulose or hydroxyethylcellulose and co-polymers thereof, as well as natural polymers including, for example, albumin, heparin and dextran.

[0073] As used herein, the term “treating” includes prophylaxis of the specific disorder or condition, or alleviation of the symptoms associated with a specific disorder or condition and/or preventing or eliminating said symptoms. For example, as used herein the term “treating diabetes” will refer in general to maintaining glucose blood levels near normal levels and may include increasing or decreasing blood glucose levels depending on a given situation.

[0074] As used herein an “effective” amount or a “therapeutically effective amount” of an glucagon analog refers to a nontoxic but sufficient amount of a glucagon analog to provide the desired effect. For example one desired effect would be the prevention or treatment of hyperglycemia. The amount that is “effective” will vary from subject to subject, depending on the age and general condition of the individual, mode of administration, and the like. Thus, it is not always possible to specify an exact “effective amount.” However, an appropriate “effective” amount in any individual case may be determined by one of ordinary skill in the art using routine experimentation.

[0075] The term, “parenteral” means not through the alimentary canal but by some other route such as intranasal, inhalation, subcutaneous, intramuscular, intraspinal, or intravenous.

[0076] As used herein the term “derivative” is intended to encompass chemical modification to a compound (e.g., an amino acid), including chemical modification in vitro, e.g. by introducing a group in a side chain in one or more positions of a polypeptide, e.g. a nitro group in a tyrosine residue, or iodine in a tyrosine residue, or by conversion of a free carboxylic group to an ester group or to an amide group, or by converting an amino group to an amide by acylation, or by acylating a hydroxy group rendering an ester, or by alkylation of a primary amine rendering a secondary amine or linkage of a hydrophilic moiety to an amino acid side chain. Other derivatives are obtained by oxidation or reduction of the side-chains of the amino acid residues in the polypeptide.

[0077] The term “identity” as used herein relates to the similarity between two or more sequences. Identity is measured by dividing the number of identical residues by the total number of residues and multiplying the product by 100 to achieve a percentage. Thus, two copies of exactly the same sequence have 100% identity, whereas two sequences that have amino acid deletions, additions, or substitutions relative to one another have a lower degree of identity. Those skilled in the art will recognize that several computer programs, such as those that employ algorithms such as BLAST (Basic Local Alignment Search Tool, Altschul et al. (1993) J. Mol. Biol. 215:403-410) are available for determining sequence identity.

[0078] As used herein, the term “selectivity” of a molecule for a first receptor relative to a second receptor refers to the following ratio: EC₅₀ of the molecule at the second receptor divided by the EC₅₀ of the molecule at the first receptor. For example, a molecule that has an EC₅₀ of 1 nM at a first receptor and an EC₅₀ of 100 nM at a second receptor has 100-fold selectivity for the first receptor relative to the second receptor.

[0079] The term “glucagon agonist peptide” refers to a compound that binds to and activates downstream signaling of the glucagon receptor.

[0080] As used herein, “thyroid hormone receptor ligand” refers to a compound that has biological agonist activity and binds to and activates downstream signaling of the thyroid hormone receptor. The thyroid hormone receptor ligand is wholly or partly non-peptidic.

[0081] As used herein an amino acid “modification” refers to a substitution of an amino acid, or the derivation of an amino acid by the addition and/or removal of chemical groups to/from the amino acid, and includes substitution with any of the 20 amino acids commonly found in human proteins, as well as atypical or non-naturally occurring amino acids. Commercial sources of atypical amino acids include Sigma-Aldrich (Milwaukee, Wis.), ChemPep Inc. (Miami, Fla.), and Genzyme Pharmaceuticals (Cambridge, Mass.). Atypical amino acids may be purchased from commercial suppliers, synthesized de novo, or chemically modified or derivatized from naturally occurring amino acids.

[0082] As used herein an amino acid “substitution” refers to the replacement of one amino acid residue by a different amino acid residue.

[0083] As used herein, the term “conservative amino acid substitution” is defined herein as exchanges within one of the following five groups:
[0084] I. Small aliphatic, nonpolar or slightly polar residues:
   [0085] Ala, Ser, Thr, Pro, Gly;
[0086] II. Polar, negatively charged residues and their amides:
   [0087] Asp, Asn, Glu, Gln, cysteic acid and homocysteic acid;
[0088] III. Polar, positively charged residues:
   [0089] His, Arg, Lys; Ornithine (Orn)
[0090] IV. Large, aliphatic, nonpolar residues:
   [0091] Met, Leu, Ile, Val, Cys, Norleucine (Nle), homocysteine
[0092] V. Large, aromatic residues:
   [0093] Phe, Tyr, Trp, acetyl phenylalanine

[0094] Throughout the application, all references to a particular amino acid position by number (e.g., position 28) refer to the amino acid at that position in native glucagon (SEQ ID NO: 1) or the corresponding amino acid position in any analogs thereof. For example, a reference herein to “position 28” would mean the corresponding position 27 for an analog of glucagon in which the first amino acid of SEQ ID NO: 1 has been deleted. Similarly, a reference herein to “position 28” would mean the corresponding position 29 for an analog of glucagon in which one amino acid has been added before the N-terminus of SEQ ID NO: 1. In addition a reference to a position greater than 29 (native glucagon only has 29 amino acids) is intended to refer to amino acid position in an analog having a C-terminus amino acid extension after the corresponding position 29 of SEQ ID NO: 1

[0095] As used herein the general term “polyethylene glycol chain” or “PEG chain”, refers to mixtures of condensation polymers of ethylene oxide and water, in a branched or straight chain, represented by the general formula H(OCH₂CH₂)—OH, wherein n is at least 2. “Polyethylene glycol chain” or “PEG chain” is used in combination with a numeric suffix to indicate the approximate average molecular weight thereof. For example, PEG-5,000 refers to polyethylene glycol chain having a total molecular weight average of about 5,000 Daltons.

[0096] As used herein the term “pegylated” and like terms refers to a compound that has been modified from its native state by linking a polyethylene glycol chain to the compound. A “pegylated polypeptide” is a polypeptide that has a PEG chain covalently bound to the polypeptide.

[0097] As used herein a “linker” is a bond, molecule or group of molecules that binds two separate entities to one another. Linkers may provide for optimal spacing of the two entities or may further supply a labile linkage that allows the two entities to be separated from each other. Labile linkages include photocleavable groups, acid-labile moieties, base-labile moieties and enzyme-cleavable groups.

[0098] The term “C₁-Cₙ alkyl” wherein n can be from 1 through 6, as used herein, represents a branched or linear alkyl group having from one to the specified number of carbon atoms. Typical C₁-C₆ alkyl groups include, but are not limited to, methyl, ethyl, n-propyl, iso-propyl, butyl, iso-Butyl, sec-butyl, tert-butyl, pentyl, hexyl and the like.

[0099] The terms “C₂-Cₙ alkenyl” wherein n can be from 2 through 6, as used herein, represents an olefinically unsaturated branched or linear group having from 2 to the specified number of carbon atoms and at least one double bond. Examples of such groups include, but are not limited to, 1-propenyl, 2-propenyl (—CH₂—CH═CH₂), 1,3-butadienyl, (—CH═CHCH═CH₂), 1-butenyl (—CH═CHCH₂CH₃), hexenyl, pentenyl, and the like.

[0100] The term “C₂-Cₙ alkynyl” wherein n can be from 2 to 6, refers to an unsaturated branched or linear group having from 2 to n carbon atoms and at least one triple bond. Examples of such groups include, but are not limited to, 1-propynyl, 2-propynyl, 1-butynyl, 2-butynyl, 1-pentynyl, and the like.

[0101] As used herein the term “aryl” refers to a mono- or bicyclic carbocyclic ring system having one or two aromatic rings including, but not limited to, phenyl, naphthyl, tetrahydronaphthyl, indanyl, indenyl, and the like. The size of the aryl ring and the presence of substituents or linking groups are indicated by designating the number of carbons present. For example, the term “(C₁-C₃alkyl)(C₆-C₁₀ aryl)” refers to a 5 to 10 membered aryl that is attached to a parent moiety via a one to three membered alkyl chain.

[0102] The term “heteroaryl” as used herein refers to a mono- or bi-cyclic ring system containing one or two aromatic rings and containing at least one nitrogen, oxygen, or sulfur atom in an aromatic ring. The size of the heteroaryl ring and the presence of substituents or linking groups are indicated by designating the number of carbons present. For example, the term “(C₁-Cₙ alkyl)(C₅-C₆heteroaryl)” refers to a 5 or 6 membered heteroaryl that is attached to a parent moiety via a one to “n” membered alkyl chain.

[0103] As used herein, the term “halo” refers to one or more members of the group consisting of fluorine, chlorine, bromine, and iodine.

[0104] As used herein the term “patient” without further designation is intended to encompass any warm blooded vertebrate domesticated animal (including for example, but not limited to livestock, horses, cats, dogs and other pets) and humans.

[0105] The term “isolated” as used herein means having been removed from its natural environment. In some embodiments, the analog is made through recombinant methods and the analog is isolated from the host cell.

[0106] The term “purified,” as used herein relates to the isolation of a molecule or compound in a form that is substantially free of contaminants normally associated with the molecule or compound in a native or natural environment and means having been increased in purity as a result of being separated from other components of the original composition. The term “purified polypeptide” is used herein to describe a polypeptide which has been separated from other compounds including, but not limited to nucleic acid molecules, lipids and carbohydrates.

[0107] As used herein, the term “peptide” encompasses a sequence of 2 or more amino acids and typically less than 50 amino acids, wherein the amino acids are naturally occurring or coded or non-naturally occurring or non-coded amino acids. Non-naturally occurring amino acids refer to amino acids that do not naturally occur in vivo but which, nevertheless, can be incorporated into the peptide structures described herein. “Non-coded” as used herein refer to an amino acid that is not an L-isomer of any of the following 20 amino acids: Ala, Cys, Asp, Glu, Phe, Gly, His, Ile, Lys, Leu, Met, Asn, Pro, Gln, Arg, Ser, Thr, Val, Trp, Tyr.

[0108] As used herein the term “hydroxyl acid” refers to an amino acid that has been modified to replace the alpha carbon amino group with a hydroxyl group.

[0109] As used herein, “partly non-peptidic” refers to a molecule wherein a portion of the molecule is a chemical compound or substituent that has biological activity and that does not comprises a sequence of amino acids.

[0110] A “peptidomimetic” refers to a chemical compound having a structure that is different from the general structure of an existing peptide, but that functions in a manner similar to the existing peptide, e.g., by mimicking the biological activity of that peptide. Peptidomimetics typically comprise naturally-occurring amino acids and/or unnatural amino acids, but can also comprise modifications to the peptide backbone. For example a peptidomimetic may include a sequence of naturally-occurring amino acids with the insertion or substitution of a non-peptide moiety, e.g. a retroinverso fragment, or incorporation of non-peptide bonds such as an azapeptide bond (CO substituted by NH) or pseudo-peptide bond (e.g. NH substituted with CH₂), or an ester bond (e.g., depsipeptides, wherein one or more of the amide (—CONHR—) bonds are replaced by ester (COOR) bonds). Alternatively the peptidomimetic may be devoid of any naturally-occurring amino acids.

[0111] As used herein the term “charged amino acid” or “charged residue” refers to an amino acid that comprises a side chain that is negatively charged (i.e., de-protonated) or positively charged (i.e., protonated) in aqueous solution at physiological pH. For example, negatively charged amino acids include aspartic acid, glutamic acid, cysteic acid, homocysteic acid, and homoglutamic acid, whereas positively charged amino acids include arginine, lysine and histidine. Charged amino acids include the charged amino acids among the 20 amino acids commonly found in human proteins, as well as atypical or non-naturally occurring amino acids.

[0112] As used herein the term “acidic amino acid” refers to an amino acid that comprises a second acidic moiety (other than the alpha carboxylic acid of the amino acid), including for example, a side chain carboxylic acid or sulfonic acid group.

[0113] As used herein, the term “prodrug” is defined as any compound that undergoes chemical modification before exhibiting its full pharmacological effects.

[0114] As used herein, a “dipeptide” is the result of the linkage of an α-amino acid or α-hydroxyl acid to another amino acid, through a peptide bond.

[0115] As used herein the term “chemical cleavage” absent any further designation encompasses a non-enzymatic reaction that results in the breakage of a covalent chemical bond.

[0116] As used herein the term “glucagon/T3 conjugates” is a generic reference to any conjugate that comprises a peptide having the ability to bind and activate the glucagon receptor and a second compound having the ability to bind and activate the thyroid hormone receptor.

### EMBODIMENTS

[0117] Thyroid hormones have profound effects on lipid, cholesterol and glucose metabolism through liver-specific actions. Thyroid hormones also have substantial effects on thermogenesis and lipolysis through adipose-specific actions. These combined actions make thyroid hormone an attractive drug candidate for the treatment of dyslipidemia and obesity. However, adverse effects primarily in the cardiovascular system have until now precluded its use for chronic treatment of metabolic diseases. Importantly, the beneficial functions of thyroid hormone on systemic metabolism are largely aligned with chronic actions of glucagon on lipid metabolism and body weight. As disclosed herein by using glucagon as a targeting ligand, unbiased thyroid hormone action can be selectively guided to the liver and adipose depots, where synergistic benefits on lipid metabolism and adiposity are unleashed. Importantly, the disclosed conjugates uncouple the metabolic benefits from deleterious effects on the cardiovascular system that would otherwise arise from systemic thyroid hormone action. Furthermore, the liver-specific effects of thyroid hormone action counteract the diabetogenic effects of glucagon action, completing mutual cancellation of the inherent limitations of each hormone. Unimolecular integration of thyroid hormone and glucagon action profiles synergize to maximize comprehensive metabolic benefits while masking their harmful effects that had prevented their individual use.

[0118] Applicants disclose herein compositions and methods for glucagon-mediated selective delivery of thyroid hormone action to the liver as a primary target and to inguinal white fat (iWAT) as a secondary target. Together, coordinated glucagon and thyroid hormone actions synergize to correct hyperlipidemia, reverse hepatic steatosis and lower body weight through liver and fat-specific mechanisms.

[0119] Provided herein are chemical conjugates of a glucagon agonist peptide and compounds having thyroid hormone activity (“glucagon/T3 conjugates”). These conjugates with plural activities are useful for the treatment of a variety of diseases including hyperlipidemia, metabolic syndrome, diabetes, obesity, liver steatosis, and chronic cardiovascular disease.

[0120] As disclosed herein chemical conjugates of glucagon and thyroid hormone (glucagon/T3) have been engineered to capitalize on the preferential sites of glucagon action to precisely harness T3 action in select tissues. Coordinated glucagon and T3 actions synergize to correct hyperlipidemia, hepatic steatosis, atherosclerosis, glucose intolerance and obesity in patients. Each hormonal constituent of the conjugate retains its native activity and mutually enriches cellular processes in hepatocytes and adipocytes. Synchronized signaling driven by glucagon and T3 reciprocally minimizes the inherent harmful effects of each hormone. Liver directed T3 action offsets the diabetogenic liability of glucagon, and glucagon-mediated delivery spares the cardiovascular system from adverse T3 action.

[0121] The glucagon agonist peptide conjugates of the present disclosure can be represented by the following formula:

Q-L-Y

[0122] wherein Q is a glucagon agonist peptide, Y is a thyroid hormone receptor ligand, and L is a linking group or a bond joining Q to Y.

[0123] Compounds that are thyroid hormone receptor ligands, particularly selective agonists of the thyroid hormone receptor, are expected to demonstrate a utility for the treatment or prevention of diseases or disorders associated with thyroid hormone activity, for example: (1) hypercholesterolemia, dyslipidemia or any other lipid disorder manifested by an unbalance of blood or tissue lipid levels; (2) atherosclerosis; (3) replacement therapy in elderly subjects with hypothyroidism who are at risk for cardiovascular complications; (4) replacement therapy in elderly subjects with subclinical hypothyroidism who are at risk for cardiovascular complications; (5) obesity; (6) diabetes (7) depression; (8) osteoporosis (especially in combination with a bone resorption inhibitor); (9) goiter; (10) thyroid cancer; (11) cardiovascular disease or congestive heart failure; (12) glaucoma; and (13) skin disorders.

[0124] As disclosed herein glucagon and T3 signaling pathways converge to reverse hypercholesterolemia through pleotropic mechanisms. The observed synergism and reciprocal regulation of certain gene targets offer clues to molecular underpinnings that could be mediating many of the responses observed on hepatic cholesterol handling by a single molecule glucagon/T3 conjugate.

[0125] Lipid deposition in the liver is a key factor in hepatic insulin resistance and the pathogenesis of type 2 diabetes. Hepatic steatosis is a predisposing determinant in liver diseases not commonly associated with diabetes, including nonalcoholic steatohepatitis (NASH), cirrhosis, and hepatocellular carcinomas. Glucagon and thyroid hormone have individually been shown to have beneficial effects on hepatic triglyceride metabolism. As demonstrated herein glucagon-mediated targeting of T3 effectively removes fat deposition in the liver more potently than either agent alone without worsening insulin sensitivity or promoting hyperthermia. The secondary effects of glucagon/T3 on adipose tissue and the associated modest weight-lowering efficacy will only further support alleviating disease symptoms of NASH.

[0126] Accordingly in one embodiment a method is provided for alleviating disease symptoms of NASH, wherein the method comprises administering a glucagon/T3 conjugate to a patient in need thereof. The glucagon/T3 conjugate acts as a specific pharmacological agent targeted to the liver in order to directly counteract the localized gluconeogenesis and glycogenolysis induced by glucagon. The addition of thyroid hormone action lessens the acute rise in blood glucose that is otherwise seen with unopposed glucagon administration, and improves glucose utilization after glucose, insulin, and pyruvate challenges that are ordinarily deteriorated after chronic glucagon treatment.

[0127] In accordance with one embodiment a method of inducing weight loss or preventing weight gain is provided, wherein the method comprises administering a glucagon/T3 conjugate to a patient in need thereof. The weight loss following glucagon/T3 therapy is due to increased energy expenditure, some of which is mediated via lipolytic mechanisms and the recruitment of thermogenesic-capable adipocytes in iWAT. The primary mechanism responsible for non-shivering thermogenesis in adipocytes is coordinated lipolysis and concurrent uncoupling of the mitochondrial respiratory chain via UCP1 to allow for rapid fatty acid oxidation, minimal ATP production, and heat production. Both glucagon and T3 have individually been reported to increase UCP1 activity in vivo.

[0128] Glucagon/T3 conjugates causes mobilization and utilization of triglycerides and cholesterol, and prevents the accumulation of atherosclerotic plaques in the aortic root, all of which are vital to reduce CHD risk. In accordance with one embodiment a method is provided for reducing the accumulation of atherosclerotic plaques in a patient and treat chronic cardiovascular disease, wherein the method comprises administering a glucagon/T3 conjugate to a patient in need thereof. In one embodiment a glucagon/T3 conjugate is administered to a patient to decrease low-density lipoprotein, triglycerides, apolipoprotein B, and lipoprotein(a) levels.

[0129] Importantly, the synergistic effects of glucagon and T3 co-agonism translate to less reliance on individual signaling cues to have equal potency as the single hormones. Thus lower circulating concentrations of the conjugate are needed to elicit lipid lowering and body weight-lowering effects, which presumably contribute to the enhanced safety profile.

### Thyroid Hormone Receptor Ligand Agonists

[0130] Thyroxine (T₄) is a thyroid hormone involved in the control of cellular metabolism. Chemically, thyroxine is an iodinated derivative of the amino acid tyrosine. The maintenance of a normal level of thyroxine is important for normal growth and development of children as well as for proper bodily function in the adult. Its absence leads to delayed or arrested development. Hypothyroidism, a condition in which the thyroid gland fails to produce enough thyroxine, leads to a decrease in the general metabolism of all cells, most characteristically measured as a decrease in nucleic acid and protein synthesis, and a slowing down of all major metabolic processes. Conversely, hyperthyroidism is an imbalance of metabolism caused by overproduction of thyroxine.

[0131] During metabolism, T4 is converted to T3 or to rT3 via removal of an iodine atom from one of the hormonal rings. T3 is the biologically active thyroid hormone, whereas rT3 has no biological activity. Both T3 and T4 are used to treat thyroid hormone deficiency (hypothyroidism). They are both absorbed well by the gut, so can be given orally.

[0132] In accordance with the present disclosure a conjugate is provided comprising a thyroid receptor ligand that is covalently linked to a glucagon agonist peptide. More particularly in one embodiment the thyroid receptor ligand (Y) of the Q-L-Y conjugate, is thyroid hormone or a thyroid hormone receptor agonist that binds and activates the thyroid receptor. Suitable compounds include any of the compounds disclosed in FIGS. 8-11 or a compound having the general structure of

[chemical structure]

wherein

[0133] R₁₅ is C₁-C₄ alkyl, —CH₂(pyridazinone), —CH₂(OH)(phenyl)F, —CH(OH)CH₃, halo or H;

[0134] R₂₀ is halo, CH₃ or H;

[0135] R₂₁ is halo, CH₃ or H;

[0136] R₂₂ is H, OH, halo, —CH₂(OH)(C₆ aryl)F, or C₁-C₄ alkyl; and

[0137] R₂₃ is —CH₂CH(NH₂)COOH, —OCH₂COOH, —NHC(O)COOH, —CH₂COOH, —NHC(O)CH₂COOH, —CH₂CH₂COOH, or —OCH₂PO₃²⁻.

[0138] In accordance with one embodiment the thyroid hormone component (Y) is a compound of the general structure

[chemical structure]

[0139] wherein

[0140] R₁₅ is C₁-C₄ alkyl, —CH(OH)CH₃, I or H

[0141] R₂₀ is I, Br, CH₃ or H;

[0142] R₂₁ is I, Br, CH₃ or H;

[0143] R₂₂ is H, OH, I, or C₁-C₄ alkyl; and

[0144] R₂₃ is —CH₂CH(NH₂)COOH, —OCH₂COOH, —NHC(O)COOH, —CH₂COOH,

[0145] —NHC(O)CH₂COOH, —CH₂CH₂COOH, or —OCH₂PO₃²⁻. In one embodiment R₂₃ is —CH₂CH(NH₂)COOH.

[0146] In accordance with one embodiment the thyroid hormone component (Y) is a compound of the general structure

[chemical structure]

[0147] wherein

[0148] R₁₅ is isopropyl, —CH(OH)CH₃, I or H

[0149] R₂₀ is I, Br, Cl, or CH₃;

[0150] R₂₁ is I, Br, Cl, or CH₃;

[0151] R₂₂ is H; and

[0152] R₂₃ is —OCH₂COOH, —CH₂COOH, —NHC(O)CH₂COOH, or —CH₂CH₂COOH.

[0153] In accordance with one embodiment the thyroid hormone component (Y) is a compound of the general structure of Formula I:

[chemical structure]

[0154] wherein

[0155] R₂₀, R₂₁, and R₂₂ are independently selected from the group consisting of H, OH, halo and C₁-C₄ alkyl; and

[0156] R₁₅ is halo or H. In one embodiment R₂₀ and R₂₁ are each CH₃, R₁₅ is H and R₂₂ are independently selected from the group consisting of H, OH, halo and C₁-C₄ alkyl. In one embodiment R₂₀, R₂₁ and R₂₂ are each halo and R₁₅ is H or halo. In a further embodiment R₂₀, R₂₁ and R₂₂ are each I or Cl, and R₁₅ is H or I. In a further embodiment R₂₀, R₂₁ and R₂₂ are each I, and R₁₅ is H or I.

[0157] In accordance with one embodiment Y is selected from the group consisting of thyroxine T4 (3,5,3′,5′-tetraiodothyronine) and 3,5,3′-triiodo L-thyronine.

[0158] In one embodiment, the thyroid receptor ligand (Y) of the Q-L-Y conjugates, is an indole derivative of thyroxine, including for example, compounds disclosed in U.S. Pat. No. 6,794,406 and US published application no. US 2009/0233979, the disclosures of which are incorporated herein. In one embodiment the indole derivative of thyroxine comprises a compound of the general structure of Formula II:

[chemical structure]

wherein

[0159] R₁₃ is H or C₁-C₄ alkyl;

[0160] R₁₄ is C₁-C₈ alkyl;

[0161] R₁₅ is H or C₁-C₄ alkyl; and

[0162] R₁₆ and R₁₇ are independently halo or C₁-C₄ alkyl.

[0163] In one embodiment, the thyroid receptor ligand (Y) of the Q-L-Y conjugates, is an indole derivative of thyroxine as disclosed in WO97/21993 (U. Cal SF), WO99/00353 (KaroBio), GB98/284425 (KaroBio), and U.S. Provisional Application 60/183,223, the disclosures of which are incorporated by reference herein. In one embodiment the thyroid receptor ligand comprises the general structure of Formula III:

[chemical structure]

wherein X is oxygen, sulfur, carbonyl, methylene, or NH;

[0164] Y is (CH₂)ₙ where n is an integer from 1 to 5, or C═C;

[0165] R₁ is halogen, trifluoromethyl, or C₁-C₆ alkyl or C₃-C₇ cycloalkyl;

[0166] R₂ and R₃ are the same or different and are hydrogen, halogen, C₁-C₆ alkyl or C₃-C₇ cycloalkyl, with the proviso that at least one of R₂ and R₃ being other than hydrogen;

[0167] R₄ is hydrogen or C₁-C₄ alkyl;

[0168] R₅ is hydrogen or C₁-C₄ alkyl;

[0169] R₆ is carboxylic acid, or ester thereof; and

[0170] R₇ is hydrogen, or an alkanoyl or aroyl group.

### The Glucagon Agonist Peptide (Q)

[0171] In one embodiment, Q of the Q-L-Y conjugates described herein is a native glucagon peptide comprising the sequence of SEQ ID NO: 1. In one embodiment Q is glucagon agonist peptide wherein the native sequence of glucagon has up to 10 modifications relative to the native sequence. A glucagon agonist peptide refers to a group of peptides related in structure in their N-terminal and/or C-terminal regions (see, for example, Sherwood et al., Endocrine Reviews 21: 619-670 (2000)). It is believed that the C-terminus generally functions in receptor binding and the N-terminus generally functions in receptor signaling. A few amino acids in the N-terminal and C-terminal regions are highly conserved among members of the glucagon agonist. Some of these conserved amino acids include Gly4, Phe6, Phe22, Val23, Trp25 and Leu26, with amino acids at these positions showing identity, conservative substitutions or similarity in the structure of their amino acid side chains.

[0172] In some embodiments, Q exhibits an EC₅₀ for glucagon receptor activation (or an IC₅₀ for glucagon receptor antagonism) of about 10 mM or less, or about 1 mM (1000 μM) or less (e.g., about 750 μM or less, about 500 μM or less, about 250 μM or less, about 100 μM or less, about 75 μM or less, about 50 μM or less, about 25 μM or less, about 10 μM or less, about 7.5 μM or less, about 6 μM or less, about 5 μM or less, about 4 μM or less, about 3 μM or less, about 2 μM or less or about 1 μM or less). In some embodiments, Q exhibits an EC₅₀ or IC₅₀ at the glucagon receptor of about 1000 nM or less (e.g., about 750 nM or less, about 500 nM or less, about 250 nM or less, about 100 nM or less, about 75 nM or less, about 50 nM or less, about 25 nM or less, about 10 nM or less, about 7.5 nM or less, about 6 nM or less, about 5 nM or less, about 4 nM or less, about 3 nM or less, about 2 nM or less or about 1 nM or less). In some embodiments, Q has an EC₅₀ or IC₅₀ at the glucagon receptor which is in the picomolar range. Accordingly, in some embodiments, Q exhibits an EC₅₀ or IC₅₀ at the glucagon receptor of about 1000 pM or less (e.g., about 750 pM or less, about 500 pM or less, about 250 pM or less, about 100 pM or less, about 75 pM or less, about 50 pM or less, about 25 pM or less, about 10 pM or less, about 7.5 pM or less, about 6 pM or less, about 5 pM or less, about 4 pM or less, about 3 pM or less, about 2 pM or less or about 1 pM or less).

[0173] In some embodiments, Q exhibits an EC₅₀ or IC₅₀ at the glucagon receptor that is about 0.001 pM or more, about 0.01 pM or more, or about 0.1 pM or more. Glucagon receptor activation (glucagon receptor activity) can be measured by in vitro assays measuring cAMP induction in HEK293 cells over-expressing the glucagon receptor, e.g., assaying HEK293 cells co-transfected with DNA encoding the glucagon receptor and a luciferase gene linked to cAMP responsive element as described in Example 2.

[0174] In some embodiments, Q exhibits about 0.001% or more, about 0.01% or more, about 0.1% or more, about 0.5% or more, about 1% or more, about 5% or more, about 10% or more, about 20% or more, about 30% or more, about 40% or more, about 50% or more, about 60% or more, about 75% or more, about 100% or more, about 125% or more, about 150% or more, about 175% or more, about 200% or more, about 250% or more, about 300% or more, about 350% or more, about 400% or more, about 450% or more, or about 500% or higher activity at the glucagon receptor relative to native glucagon (glucagon potency). In some embodiments, Q exhibits about 5000% or less or about 10,000% or less activity at the glucagon receptor relative to native glucagon. The activity of Q at a receptor relative to a native ligand of the receptor is calculated as the inverse ratio of EC₅₀s for Q versus the native ligand.

[0175] In one embodiment the native glucagon sequence is modified as follows:

### Improved Solubility

[0176] Native glucagon exhibits poor solubility in aqueous solution, particularly at physiological pH, with a tendency to aggregate and precipitate over time. In contrast, the glucagon agonist peptides in some embodiments exhibit at least 2-fold, 5-fold, or even higher solubility compared to native glucagon at a pH between 6 and 8, or between 6 and 9, for example, at pH 7 after 24 hours at 25° C.

[0177] Accordingly, in some embodiments, a glucagon agonist peptide has been modified relative to the wild type peptide of His-Ser-Gln-Gly-Thr-Phe-Thr-Ser-Asp-Tyr-Ser-Lys-Tyr-Leu-Asp-Ser-Arg-Arg-Ala-Gln-Asp-Phe-Val-Gln-Trp-Leu-Met-Asn-Thr (SEQ ID NO: 1) to improve the peptide's solubility in aqueous solutions, particularly at a pH ranging from about 5.5 to about 8.0, while retaining the native peptide's biological activity.

[0178] For example, the solubility of any of the glucagon agonist peptides described herein can be further improved by attaching a hydrophilic moiety to the peptide. Introduction of such groups also increases duration of action, e.g. as measured by a prolonged half-life in circulation.

[0179] In some embodiments, solubility is improved by adding charge to the glucagon agonist peptide by the substitution of native non-charged amino acids with charged amino acids selected from the group consisting of lysine, arginine, histidine, aspartic acid and glutamic acid, or by the addition of charged amino acids to the amino or carboxy terminus of the peptide.

[0180] In accordance with some embodiments, the glucagon agonist peptide has improved solubility due to the fact that the peptide is modified by amino acid substitutions and/or additions that introduce a charged amino acid into the C-terminal portion of the peptide, and in some embodiments at a position C-terminal to position 27 of SEQ ID NO: 1. Optionally, one, two or three charged amino acids may be introduced within the C-terminal portion, and in some embodiments C-terminal to position 27. In accordance with some embodiments, the native amino acid(s) at positions 28 and/or 29 are substituted with a charged amino acid, and/or one to three charged amino acids are added to the C-terminus of the peptide, e.g. after position 27, 28 or 29. In exemplary embodiments, one, two, three or all of the charged amino acids are negatively charged. In other embodiments, one, two, three or all of the charged amino acids are positively charged.

[0181] In specific exemplary embodiments, the glucagon agonist peptide may comprise any one or two of the following modifications: substitution of N28 with E; substitution of N28 with D; substitution of T29 with D; substitution of T29 with E; insertion of E after position 27, 28 or 29; insertion of D after position 27, 28 or 29. For example, D28E29, E28E29, E29E30, E28E30, D28E30.

[0182] In accordance with one exemplary embodiment, the glucagon agonist peptide comprises an amino acid sequence of SEQ ID NO: 811, or an analog thereof that contains 1 to 3 further amino acid modifications (described herein in reference to glucagon agonists) relative to native glucagon, or a glucagon agonist analog thereof. SEQ ID NO: 811 represents a modified glucagon agonist peptide, wherein the asparagine residue at position 28 of the native protein has been substituted with an aspartic acid. In another exemplary embodiment the glucagon agonist peptide comprises an amino acid sequence of SEQ ID NO: 838, wherein the asparagine residue at position 28 of the native protein has been substituted with glutamic acid. Other exemplary embodiments include glucagon agonist peptides of SEQ ID NOs: 824, 825, 826, 833, 835, 836 and 837.

[0183] Substituting the normally occurring amino acid at position 28 and/or 29 with charged amino acids, and/or the addition of one to two charged amino acids at the carboxy terminus of the glucagon agonist peptide, enhances the solubility and stability of the glucagon peptides in aqueous solutions at physiologically relevant pHs (i.e., a pH of about 6.5 to about 7.5) by at least 5-fold and by as much as 30-fold. Accordingly, glucagon agonist peptides of some embodiments retain glucagon activity and exhibit at least 2-fold, 5-fold, 10-fold, 15-fold, 25-fold, 30-fold or greater solubility relative to native glucagon at a given pH between about 5.5 and 8, e.g., pH 7, when measured after 24 hours at 25° C.

[0184] Additional modifications, e.g. conservative substitutions, which modifications are further described herein, may be made to the glucagon agonist peptide that still allow it to retain glucagon activity.

### Improved Stability

[0185] Any of the glucagon agonist peptides may additionally exhibit improved stability and/or reduced degradation, for example, retaining at least 95% of the original peptide after 24 hours at 25° C. Any of the glucagon agonist peptides disclosed herein may additionally exhibit improved stability at a pH within the range of 5.5 to 8, for example, retaining at least 75%, 80%, 90%, 95%, 96%, 97%, 98% or 99% of the original peptide after 24 hours at 25° C. In some embodiments, the glucagon agonist peptides of the invention exhibit improved stability, such that at least 75% (e.g., at least 80%, at least 85%, at least 90%, at least 95%, more than 95%, up to 100%) of a concentration of the peptide or less than about 25% (e.g., less than 20%, less than 15%, less than 10%, less than 5%, 4%, 3%, 2%, 1%, down to 0%) of degraded peptide is detectable at 280 nm by an ultraviolet (UV) detector after about 1 or more weeks (e.g., about 2 weeks, about 4 weeks, about 1 month, about two months, about four months, about six months, about eight months, about ten months, about twelve months) in solution at a temperature of at least 20° C. (e.g., 21° C., 22° C., 23° C., 24° C., 25° C., 26° C., at least 27.5° C., at least 30° C., at least 35° C., at least 40° C., at least 50° C.) and less than 100° C., less than 85° C., less than 75° C., or less than 70° C. The glucagon agonist peptides may include additional modifications that alter its pharmaceutical properties, e.g. increased potency, prolonged half-life in circulation, increased shelf-life, reduced precipitation or aggregation, and/or reduced degradation, e.g., reduced occurrence of cleavage or chemical modification after storage.

[0186] In yet further exemplary embodiments, any of the foregoing glucagon agonist peptides can be further modified to improve stability by modifying the amino acid at position 15 of SEQ ID NO: 1 to reduce degradation of the peptide over time, especially in acidic or alkaline buffers. In exemplary embodiments, Asp at position 15 is substituted with a Glu, homo-Glu, cysteic acid, or homo-cysteic acid.

[0187] Alternatively, any of the glucagon agonist peptides described herein can be further modified to improve stability by modifying the amino acid at position 16 of SEQ ID NO: 1. In exemplary embodiments, Ser at position 16 is substituted with Thr or Aib, or any of the amino acids substitutions described herein with regard to glucagon agonist peptides which enhance potency at the glucagon receptor. Such modifications reduce cleavage of the peptide bond between Asp15-Ser16.

[0188] In some embodiments, any of the glucagon agonist peptides described herein can be further modified to reduce degradation at various amino acid positions by modifying any one, two, three, or all four of positions 20, 21, 24, or 27. Exemplary embodiments include substitution of Gln at position 20 with Ser, Thr, Ala or Aib, substitution of Asp at position 21 with Glu, substitution of Gln at position 24 with Ala or Aib, substitution of Met at position 27 with Leu or Nle. Removal or substitution of methionine reduces degradation due to oxidation of the methionine. Removal or substitution of Gln or Asn reduces degradation due to deamidation of Gln or Asn. Removal or substitution of Asp reduces degradation that occurs through dehydration of Asp to form a cyclic succinimide intermediate followed by isomerization to iso-aspartate.

### Enhanced Potency

[0189] In accordance with another embodiment, glucagon agonist peptides are provided that have enhanced potency at the glucagon receptor, wherein the peptides comprise an amino acid modification at position 16 of native glucagon (SEQ ID NO: 1). By way of nonlimiting example, such enhanced potency can be provided by substituting the naturally occurring serine at position 16 with glutamic acid or with another negatively charged amino acid having a side chain with a length of 4 atoms, or alternatively with any one of glutamine, homoglutamic acid, or homocysteic acid, or a charged amino acid having a side chain containing at least one heteroatom, (e.g. N, O, S, P) and with a side chain length of about 4 (or 3-5) atoms. Substitution of serine at position 16 with glutamic acid enhances glucagon activity at least 2-fold, 4-fold, 5-fold and up to 10-fold greater at the glucagon receptor. In some embodiments, the glucagon agonist peptide retains selectivity for the glucagon receptor relative to the GLP-1 receptors, e.g., at least 5-fold, 10-fold, or 15-fold selectivity.

### DPP-IV Resistance

[0190] In some embodiments, the glucagon peptides disclosed herein are further modified at position 1 or 2 to reduce susceptibility to cleavage by dipeptidyl peptidase IV. More particularly, in some embodiments, position 1 and/or position 2 of the glucagon agonist peptide is substituted with the DPP-IV resistant amino acid(s) described herein. In some embodiments, position 2 of the analog peptide is substituted with an amino isobutyric acid. In some embodiments, position 2 of the analog peptide is substituted with an amino acid selected from the group consisting of D-serine, D-alanine, glycine, N-methyl serine, and ε-amino butyric acid. In another embodiment, position 2 of the glucagon agonist peptide is substituted with an amino acid selected from the group consisting of D-serine, glycine, and aminoisobutyric acid. In some embodiments, the amino acid at position 2 is not D-serine.

[0191] Reduction in glucagon activity upon modification of the amino acids at position 1 and/or position 2 of the glucagon peptide can be restored by stabilization of the alpha-helix structure in the C-terminal portion of the glucagon peptide (around amino acids 12-29). The alpha helix structure can be stabilized by, e.g., formation of a covalent or non-covalent intramolecular bridge (e.g., a lactam bridge between side chains of amino acids at positions “i” and “i+4”, wherein i is an integer from 12 to 25), substitution and/or insertion of amino acids around positions 12-29 with an alpha helix-stabilizing amino acid (e.g., an α,α-disubstituted amino acid such as Aib), as further described herein.

### Modifications at Position 3

[0192] Glucagon receptor activity can be reduced by an amino acid modification at position 3 (according to the amino acid numbering of wild type glucagon), e.g. substitution of the naturally occurring glutamine at position 3, with an acidic, basic, or a hydrophobic amino acid. For example substitution at position 3 with glutamic acid, ornithine, or norleucine substantially reduces or destroys glucagon receptor activity. Maintained or enhanced activity at the glucagon receptor may be achieved by modifying the Gln at position 3 with a glutamine analog as described herein. For example, glucagon agonists can comprise the amino acid sequence of SEQ ID NO: 863, SEQ ID NO: 869, SEQ ID NO: 870, SEQ ID NO: 871, SEQ ID NO: 872, SEQ ID NO: 873, and SEQ ID NO: 874.

[0193] Additional modifications may be made to the glucagon agonist peptide which may further increase solubility and/or stability and/or glucagon activity. The glucagon agonist peptide may alternatively comprise other modifications that do not substantially affect solubility or stability, and that do not substantially decrease glucagon activity. In exemplary embodiments, the glucagon agonist peptide may comprise a total of up to 11, or up to 12, or up to 13, or up to 14 amino acid modifications relative to the native glucagon sequence. For example, conservative or non-conservative substitutions, additions or deletions may be carried out at any of positions 2, 5, 7, 10, 11, 12, 13, 14, 17, 18, 19, 20, 21, 24, 27, 28 or 29.

[0194] Exemplary modifications of the glucagon agonist peptide include but are not limited to:

[0195] (a) non-conservative substitutions, conservative substitutions, additions or deletions while retaining at least partial glucagon agonist activity, for example, conservative substitutions at one or more of positions 2, 5, 7, 10, 11, 12, 13, 14, 16, 17, 18, 19, 20, 21, 24, 27, 28 or 29, substitution of Tyr at position 10 with Val or Phe, substitution of Lys at position 12 with Arg, substitution of one or more of these positions with Ala;

[0196] (b) deletion of amino acids at positions 29 and/or 28, and optionally position 27, while retaining at least partial glucagon agonist activity;

[0197] (c) modification of the aspartic acid at position 15, for example, by substitution with glutamic acid, homoglutamic acid, cysteic acid or homocysteic acid, which may reduce degradation; or modification of the serine at position 16, for example, by substitution of threonine, Aib, glutamic acid or with another negatively charged amino acid having a side chain with a length of 4 atoms, or alternatively with any one of glutamine, homoglutamic acid, or homocysteic acid, which likewise may reduce degradation due to cleavage of the Asp15-Ser16 bond;

[0198] (d) addition of a hydrophilic moiety such as the water soluble polymer polyethylene glycol, as described herein, e.g. at position 16, 17, 20, 21, 24, 29, 40 or at the C-terminal amino acid, which may increase solubility and/or half-life;

[0199] (e) modification of the methionine at position 27, for example, by substitution with leucine or norleucine, to reduce oxidative degradation;

[0200] (f) modification of the Gln at position 20 or 24, e.g. by substitution with Ser, Thr, Ala or Aib, to reduce degradation that occurs through deamidation of Gln

[0201] (g) modification of Asp at position 21, e.g. by substitution with Glu, to reduce degradation that occurs through dehydration of Asp to form a cyclic succinimide intermediate followed by isomerization to iso-aspartate;

[0202] (h) modifications at position 1 or 2 as described herein that improve resistance to DPP-IV cleavage, optionally in combination with an intramolecular bridge such as a lactam bridge between positions “i” and “i+4”, wherein i is an integer from 12 to 25, e.g., 12, 16, 20, 24;

[0203] (i) acylating or alkylating the glucagon peptide as described herein, which may increase the activity at the glucagon receptor and/or the GLP-1 receptor, increase half-life in circulation and/or extending the duration of action and/or delaying the onset of action, optionally combined with addition of a hydrophilic moiety, additionally or alternatively, optionally combined with a modification which selectively reduces activity at the GLP-1 peptide, e.g., a modification of the Thr at position 7, such as a substitution of the Thr at position 7 with an amino acid lacking a hydroxyl group, e.g., Abu or Ile; deleting amino acids C-terminal to the amino acid at position 27 (e.g., deleting one or both of the amino acids at positions 28 and 29, yielding a peptide 27 or 28 amino acids in length);

[0204] (j) C-terminal extensions as described herein;

[0205] (k) homodimerization or heterodimerization as described herein; and

[0206] combinations of the (a) through (k).

[0207] In some embodiments, exemplary modifications of the glucagon agonist peptide include at least one amino acid modification selected from Group A and one or more amino acid modifications selected from Group B and/or Group C,

wherein Group A is:

[0208] substitution of Asn at position 28 with a charged amino acid;

[0209] substitution of Asn at position 28 with a charged amino acid selected from the group consisting of Lys, Arg, His, Asp, Glu, cysteic acid, and homocysteic acid;

[0210] substitution at position 28 with Asn, Asp, or Glu;

[0211] substitution at position 28 with Asp;

[0212] substitution at position 28 with Glu;

[0213] substitution of Thr at position 29 with a charged amino acid;

[0214] substitution of Thr at position 29 with a charged amino acid selected from the group consisting of Lys, Arg, His, Asp, Glu, cysteic acid, and homocysteic acid;

[0215] substitution at position 29 with Asp, Glu, or Lys;

[0216] substitution at position 29 with Glu;

[0217] insertion of 1-3 charged amino acids after position 29;

[0218] insertion after position 29 of Glu or Lys;

[0219] insertion after position 29 of Gly-Lys or Lys-Lys;

[0220] or combinations thereof;

wherein Group B is:

[0221] substitution of Asp at position 15 with Glu;

[0222] substitution of Ser at position 16 with Thr or Aib;

and wherein Group C is:

[0223] substitution of His at position 1 with a non-native amino acid that reduces susceptibility of the glucagon peptide to cleavage by dipeptidyl peptidase IV (DPP-IV),

[0224] substitution of Ser at position 2 with a non-native amino acid that reduces susceptibility of the glucagon peptide to cleavage by dipeptidyl peptidase IV (DPP-IV),

[0225] substitution of Lys at position 12 with Arg;

[0226] substitution of Gln at position 20 with Ser, Thr, Ala or Aib;

[0227] substitution of Asp at position 21 with Glu;

[0228] substitution of Gln at position 24 with Ser, Thr, Ala or Aib;

[0229] substitution of Met at position 27 with Leu or Nle;

[0230] deletion of amino acids at positions 27-29;

[0231] deletion of amino acids at positions 28-29;

[0232] deletion of the amino acid at positions 29;

[0233] or combinations thereof.

[0234] In exemplary embodiments, Lys at position 12 is substituted with Arg. In other exemplary embodiments amino acids at positions 29 and/or 28, and optionally at position 27, are deleted.

[0235] In some specific embodiments, the glucagon peptide comprises (a) an amino acid modification at position 1 and/or 2 that confers DPP-IV resistance, e.g., substitution with DMIA at position 1, or Aib at position 2, (b) an intramolecular bridge within positions 12-29, e.g. at positions 16 and 20, or one or more substitutions of the amino acids at positions 16, 20, 21, and 24 with an α,α disubstituted amino acid, optionally (c) linked to a hydrophilic moiety such as PEG, e.g., through Cys at position 24, 29 or at the C-terminal amino acid, optionally (d) an amino acid modification at position 27 that substitutes Met with, e.g., Nle, optionally (e) amino acid modifications at positions 20, 21 and 24 that reduce degradation, and optionally (f) linked to SEQ ID NO: 820. When the glucagon peptide is linked to SEQ ID NO: 820, the amino acid at position 29 in certain embodiments is Thr or Gly. In other specific embodiments, the glucagon peptide comprises (a) Asp28Glu29, or Glu28Glu29, or Glu29Glu30, or Glu28Glu30 or Asp28Glu30, and optionally (b) an amino acid modification at position 16 that substitutes Ser with, e.g. Thr or Aib, and optionally (c) an amino acid modification at position 27 that substitutes Met with, e.g., Nle, and optionally (d) amino acid modifications at positions 20, 21 and 24 that reduce degradation. In a specific embodiment, the glucagon peptide is T16, A20, E21, A24, Nle27, D28, E29.

[0236] In some embodiments, the glucagon agonist peptide comprises the amino acid sequence:

[0237] X1-X2-Gln-Gly-Thr-Phe-Thr-Ser-Asp-Tyr-Ser-Lys-Tyr-Leu-Asp-Ser-Arg-Arg-Ala-Gln-Asp-Phe-Val-Gln-Trp-Leu-Met-Z (SEQ ID NO: 839) with 1 to 3 amino acid modifications thereto,

[0238] wherein X1 and/or X2 is a non-native amino acid that reduces susceptibility of (or increases resistance of) the glucagon peptide to cleavage by dipeptidyl peptidase IV (DPP-IV), optionally wherein X1 is selected from the group consisting of His, D-His, N-methyl-His, alpha-methyl-His, imidazole acetic acid, des-amino-His, hydroxyl-His, acetyl-His, homo-His, and alpha, alpha-dimethyl imidiazole acetic acid (DMIA), and X2 is selected from the group consisting of: Ser, D-Ser, D-Ala, Gly, N-methyl-Ser, Val, and alpha, amino isobutyric acid (Aib), wherein at least one of X1 and X2 is a non-native amino acid at that position relative to SEQ ID NO: 1.

[0239] wherein Z is selected from the group consisting of —COOH (the naturally occurring C-terminal carboxylate), -Asn-COOH, Asn-Thr-COOH, and Y—COOH, wherein Y is 1 to 2 amino acids, and

[0240] optionally wherein an intramolecular bridge, preferably a covalent bond, connects the side chains of an amino acid at position i and an amino acid at position i+4, wherein i is 12, 16, 20 or 24.

[0241] In some embodiments, the intramolecular bridge is a lactam bridge. In some embodiments, the amino acids at positions i and i+4 of SEQ ID NO: 839 are Lys and Glu, e.g., Glu16 and Lys20. In some embodiments, X1 is selected from the group consisting of: D-His, N-methyl-His, alpha-methyl-His, imidazole acetic acid, des-amino-His, hydroxyl-His, acetyl-His, homo-His, and alpha, alpha-dimethyl imidiazole acetic acid (DMIA). In other embodiments, X2 is selected from the group consisting of: D-Ser, D-Ala, Gly, N-methyl-Ser, Val, and alpha, amino isobutyric acid (Aib).

[0242] In some embodiments, the glucagon peptide is covalently linked to a hydrophilic moiety at any of amino acid positions 16, 17, 20, 21, 24, 29, 40, within a C-terminal extension, or at the C-terminal amino acid. In exemplary embodiments, this hydrophilic moiety is covalently linked to a Lys, Cys, Orn, homocysteine, or acetyl-phenylalanine residue at any of these positions. Exemplary hydrophilic moieties include polyethylene glycol (PEG), for example, of a molecular weight of about 1,000 Daltons to about 40,000 Daltons, or about 20,000 Daltons to about 40,000 Daltons.

[0243] In other embodiments, the glucagon agonist peptide comprises the amino acid sequence: X1-X2-Gln-Gly-Thr-Phe-Thr-Ser-Asp-Tyr-Ser-Lys-Tyr-Leu-Asp-Ser-Arg-Arg-Ala-Gln-Asp-Phe-Val-Gln-Trp-Leu-Met-Z (SEQ ID NO: 839),

[0244] wherein X1 and/or X2 is a non-native amino acid that reduces susceptibility of (or increases resistance of) the glucagon peptide to cleavage by dipeptidyl peptidase IV (DPP-IV), optionally wherein X1 is selected from the group consisting of His, D-His, N-methyl-His, alpha-methyl-His, imidazole acetic acid, des-amino-His, hydroxyl-His, acetyl-His, homo-His, and alpha, alpha-dimethyl imidiazole acetic acid (DMIA), and X2 is selected from the group consisting of: Ser, D-Ser, D-Ala, Gly, N-methyl-Ser, Val, and alpha, amino isobutyric acid (Aib), wherein at least one of X1 and X2 is a non-native amino acid at that position relative to SEQ ID NO: 1.

[0245] wherein one, two, three, four or more of positions 16, 20, 21, and 24 of the glucagon peptide is substituted with an α,α-disubstituted amino acid, and

[0246] wherein Z is selected from the group consisting of —COOH (the naturally occurring C-terminal carboxylate), -Asn-COOH, Asn-Thr-COOH, and Y—COOH, wherein Y is 1 to 2 amino acids.

[0247] Exemplary further amino acid modifications to the foregoing glucagon agonist peptides include substitution of Thr at position 7 with an amino acid lacking a hydroxyl group, e.g., aminobutyric acid (Abu), Ile, optionally, in combination with substitution or addition of an amino acid comprising a side chain covalently attached (optionally, through a spacer) to an acyl or alkyl group, which acyl or alkyl group is non-native to a naturally-occurring amino acid, substitution of Lys at position 12 with Arg; substitution of Asp at position 15 with Glu; substitution of Ser at position 16 with Thr or Aib; substitution of Gln at position 20 with Ser, Thr, Ala or Aib; substitution of Asp at position 21 with Glu; substitution of Gln at position 24 with Ser, Thr, Ala or Aib; substitution of Met at position 27 with Leu or Nle; substitution of Asn at position 28 with a charged amino acid; substitution of Asn at position 28 with a charged amino acid selected from the group consisting of Lys, Arg, His, Asp, Glu, cysteic acid, and homocysteic acid; substitution at position 28 with Asn, Asp, or Glu; substitution at position 28 with Asp; substitution at position 28 with Glu; substitution of Thr at position 29 with a charged amino acid; substitution of Thr at position 29 with a charged amino acid selected from the group consisting of Lys, Arg, His, Asp, Glu, cysteic acid, and homocysteic acid; substitution at position 29 with Asp, Glu, or Lys; substitution at position 29 with Glu; insertion of 1-3 charged amino acids after position 29; insertion at position 30 (i.e., after position 29) of Glu or Lys; optionally with insertion at position 31 of Lys; addition of SEQ ID NO: 820 to the C-terminus, optionally, wherein the amino acid at position 29 is Thr or Gly; substitution or addition of an amino acid covalently attached to a hydrophilic moiety; or a combination thereof.

[0248] Any of the modifications described above in reference to glucagon agonists which increase glucagon receptor activity, retain partial glucagon receptor activity, improve solubility, increase stability, or reduce degradation can be applied to glucagon peptides individually or in combination. Thus, glucagon agonist peptides can be prepared that retain at least 20% of the activity of native glucagon at the glucagon receptor, and which are soluble at a concentration of at least 1 mg/mL at a pH between 6 and 8 or between 6 and 9, (e.g. pH 7), and optionally retain at least 95% of the original peptide (e.g. 5% or less of the original peptide is degraded or cleaved) after 24 hours at 25° C. Alternatively, high potency glucagon peptides can be prepared that exhibit at least about 100%, 125%, 150%, 175%, 200%, 250%, 300%, 350%, 400%, 450%, 500%, 600%, 700%, 800%, 900% or 10-fold or more of the activity of native glucagon at the glucagon receptor, and optionally are soluble at a concentration of at least 1 mg/mL at a pH between 6 and 8 or between 6 and 9, (e.g. pH 7), and optionally retains at least 95% of the original peptide (e.g. 5% or less of the original peptide is degraded or cleaved) after 24 hours at 25° C. In some embodiments, the glucagon peptides described herein may exhibit at least any of the above indicated relative levels of activity at the glucagon receptor but no more than 1,000%, 5,000% or 10,000% of the activity of native glucagon at the glucagon receptor.

### Examples of Embodiments of Glucagon Agonist Peptides

[0249] In accordance with some embodiments the native glucagon peptide of SEQ ID NO: 1 is modified by the substitution of the native amino acid at position 28 and/or 29 with a negatively charged amino acid (e.g., aspartic acid or glutamic acid) and optionally the addition of a negatively charged amino acid (e.g., aspartic acid or glutamic acid) to the carboxy terminus of the peptide. In an alternative embodiment the native glucagon peptide of SEQ ID NO: 1 is modified by the substitution of the native amino acid at position 29 with a positively charged amino acid (e.g., lysine, arginine or histidine) and optionally the addition of one or two positively charged amino acid (e.g., lysine, arginine or histidine) on the carboxy terminus of the peptide. In accordance with some embodiments a glucagon analog having improved solubility and stability is provided wherein the analog comprises the amino acid sequence of SEQ ID NO: 834 with the proviso that at least one amino acids at position, 28, or 29 is substituted with an acidic amino acid and/or an additional acidic amino acid is added at the carboxy terminus of SEQ ID NO: 834. In some embodiments the acidic amino acids are independently selected from the group consisting of Asp, Glu, cysteic acid and homocysteic acid.

[0250] In accordance with some embodiments a glucagon agonist having improved solubility and stability is provided wherein the agonist comprises the amino acid sequence of SEQ ID NO: 833, wherein at least one of the amino acids at positions 27, 28 or 29 is substituted with a non-native amino acid residue (i.e. at least one amino acid present at position 27, 28 or 29 of the analog is an acid amino acid different from the amino acid present at the corresponding position in SEQ ID NO: 1). In accordance with some embodiments a glucagon agonist is provided comprising the sequence of SEQ ID NO: 833 with the proviso that when the amino acid at position 28 is asparagine and the amino acid at position 29 is threonine, the peptide further comprises one to two amino acids, independently selected from the group consisting of Lys, Arg, His, Asp or Glu, added to the carboxy terminus of the glucagon peptide.

[0251] It has been reported that certain positions of the native glucagon peptide can be modified while retaining at least some of the activity of the parent peptide. Accordingly, applicants anticipate that one or more of the amino acids located at positions at positions 2, 5, 7, 10, 11, 12, 13, 14, 16, 17, 18, 19, 20, 21, 24, 27, 28 or 29 of the peptide of SEQ ID NO: 811 can be substituted with an amino acid different from that present in the native glucagon peptide, and still retain the enhanced potency, physiological pH stability and biological activity of the parent glucagon peptide. For example, in accordance with some embodiments the methionine residue present at position 27 of the native peptide is changed to leucine or norleucine to prevent oxidative degradation of the peptide.

[0252] In some embodiments a glucagon analog of SEQ ID NO: 833 is provided wherein 1 to 6 amino acids, selected from positions 1, 2, 5, 7, 10, 11, 12, 13, 14, 16, 17, 18, 19, 20, 21 or 24 of the analog differ from the corresponding amino acid of SEQ ID NO: 1. In accordance with another embodiment a glucagon analog of SEQ ID NO: 833 is provided wherein 1 to 3 amino acids selected from positions 1, 2, 5, 7, 10, 11, 12, 13, 14, 16, 17, 18, 19, 20, 21 or 24 of the analog differ from the corresponding amino acid of SEQ ID NO: 1. In another embodiment, a glucagon analog of SEQ ID NO: 807, SEQ ID NO: 808 or SEQ ID NO: 834 is provided wherein 1 to 2 amino acids selected from positions 1, 2, 5, 7, 10, 11, 12, 13, 14, 16, 17, 18, 19, 20, 21 or 24 of the analog differ from the corresponding amino acid of SEQ ID NO: 1, and in a further embodiment those one to two differing amino acids represent conservative amino acid substitutions relative to the amino acid present in the native sequence (SEQ ID NO: 1). In some embodiments a glucagon peptide of SEQ ID NO: 811 or SEQ ID NO: 813 is provided wherein the glucagon peptide further comprises one, two or three amino acid substitutions at positions selected from positions 2, 5, 7, 10, 11, 12, 13, 14, 16, 17, 18, 19, 20, 21, 24, 27 or 29. In some embodiments the substitutions at positions 2, 5, 7, 10, 11, 12, 13, 14, 16, 17, 18, 19, 20, 27 or 29 are conservative amino acid substitutions.

[0253] In some embodiments a glucagon agonist is provided comprising an analog peptide of SEQ ID NO: 1 wherein the analog differs from SEQ ID NO: 1 by having an amino acid other than serine at position 2 and by having an acidic amino acid substituted for the native amino acid at position 28 or 29 or an acidic amino acid added to the carboxy terminus of the peptide of SEQ ID NO: 1. In some embodiments the acidic amino acid is aspartic acid or glutamic acid. In some embodiments a glucagon analog of SEQ ID NO: 809, SEQ ID NO: 812, SEQ ID NO: 813 or SEQ ID NO: 832 is provided wherein the analog differs from the parent molecule by a substitution at position 2. More particularly, position 2 of the analog peptide is substituted with an amino acid selected from the group consisting of D-serine, alanine, D-alanine, glycine, n-methyl serine and amino isobutyric acid.

[0254] In another embodiment a glucagon agonist is provided comprising an analog peptide of SEQ ID NO: 1 wherein the analog differs from SEQ ID NO: 1 by having an amino acid other than histidine at position 1 and by having an acidic amino acid substituted for the native amino acid at position 28 or 29 or an acidic amino acid added to the carboxy terminus of the peptide of SEQ ID NO: 1. In some embodiments the acidic amino acid is aspartic acid or glutamic acid. In some embodiments a glucagon analog of SEQ ID NO: 809, SEQ ID NO: 812, SEQ ID NO: 813 or SEQ ID NO: 832 is provided wherein the analog differs from the parent molecule by a substitution at position 1. More particularly, position 1 of the analog peptide is substituted with an amino acid selected from the group consisting of DMIA, D-histidine, desaminohistidine, hydroxyl-histidine, acetyl-histidine and homo-histidine.

[0255] In accordance with some embodiments the modified glucagon peptide comprises a sequence selected from the group consisting of SEQ ID NO: 809, SEQ ID NO: 812, SEQ ID NO: 813 and SEQ ID NO: 832. In a further embodiment a glucagon peptide is provided comprising a sequence of SEQ ID NO: 809, SEQ ID NO: 812, SEQ ID NO: 813 or SEQ ID NO: 832 further comprising one to two amino acids, added to the C-terminus of SEQ ID NO: 809, SEQ ID NO: 812, SEQ ID NO: 813 or SEQ ID NO: 832, wherein the additional amino acids are independently selected from the group consisting of Lys, Arg, His, Asp Glu, cysteic acid or homocysteic acid. In some embodiments the additional amino acids added to the carboxy terminus are selected from the group consisting of Lys, Arg, His, Asp or Glu or in a further embodiment the additional amino acids are Asp or Glu.

[0256] In another embodiment the glucagon peptide comprises the sequence of SEQ ID NO: 807 or a glucagon agonist analog thereof. In some embodiments the peptide comprising a sequence selected from the group consisting of SEQ ID NO: 808, SEQ ID NO: 810, SEQ ID NO: 811, SEQ ID NO: 812 and SEQ ID NO: 813. In another embodiment the peptide comprising a sequence selected from the group consisting of SEQ ID NO: 808, SEQ ID NO: 810 and SEQ ID NO: 811. In some embodiments the glucagon peptide comprises the sequence of SEQ ID NO: 808, SEQ ID NO: 810 and SEQ ID NO: 811 further comprising an additional amino acid, selected from the group consisting of Asp and Glu, added to the C-terminus of the glucagon peptide. In some embodiments the glucagon peptide comprises the sequence of SEQ ID NO: 811 or SEQ ID NO: 813, and in a further embodiment the glucagon peptide comprises the sequence of SEQ ID NO: 811.

[0257] In accordance with some embodiments a glucagon agonist is provided comprising a modified glucagon peptide selected from the group consisting of:

(SEQ ID NO: 834)
NH₂-His-Ser-Gln-Gly-Thr-Phe-Thr-Ser-Asp-Tyr-Ser-
Lys-Tyr-Leu-Xaa-Ser-Arg-Arg-Ala-Gln-Asp-Phe-Val-
Gln-Trp-Leu-Xaa-Xaa-Xaa-R,
(SEQ ID NO: 811)
NH₂-His-Ser-Gln-Gly-Thr-Phe-Thr-Ser-Asp-Tyr-Ser-
Lys-Tyr-Leu-Asp-Ser-Arg-Arg-Ala-Gln-Asp-Phe-Val-
Gln-Trp-Leu-Met-Asp-Thr-R
and
(SEQ ID NO: 813)
NH₂-His-Ser-Gln-Gly-Thr-Phe-Thr-Ser-Asp-Tyr-Ser-
Lys-Tyr-Leu-Glu-Ser-Arg-Arg-Ala-Gln-Asp-Phe-Val-
Gln-Trp-Leu-Met-Asp-Thr-R

[0258] Wherein the Xaa at position 15 is Asp, Glu, cysteic acid, homoglutamic acid or homocysteic acid, the Xaa at position 27 is Met, Leu or Nle, the Xaa at position 28 is Asn or an acidic amino acid and the Xaa at position 29 is Thr or an acidic amino acid and R is an acidic amino acid, COOH or CONH₂, with the proviso that an acidic acid residue is present at one of positions 28, 29 or 30. In some embodiments R is COOH, and in another embodiment R is CONH₂.

[0259] The present disclosure also encompasses glucagon fusion peptides wherein a second peptide has been fused to the C-terminus of the glucagon peptide to enhance the stability and solubility of the glucagon peptide. More particularly, the fusion glucagon peptide may comprise a glucagon agonist analog comprising a glucagon peptide NH₂-His-Ser-Gln-Gly-Thr-Phe-Thr-Ser-Asp-Tyr-Ser-Lys-Tyr-Leu-Xaa-Ser-Arg-Arg-Ala-Gln-Asp-Phe-Val-Gln-Trp-Leu-Xaa-Xaa-Xaa-R (SEQ ID NO: 834), wherein R is an acidic amino acid or an amino acid sequence of SEQ ID NO: 820 (GPSSGAPPPS), SEQ ID NO: 821 (KRNRNNIA) or SEQ ID NO: 822 (KRNR) linked to the carboxy terminal amino acid of the glucagon peptide. In some embodiments the glucagon peptide is selected from the group consisting of SEQ ID NO: 833, SEQ ID NO: 807 or SEQ ID NO: 808 further comprising an amino acid sequence of SEQ ID NO: 820 (GPSSGAPPPS), SEQ ID NO: 821 (KRNRNNIA) or SEQ ID NO: 822 (KRNR) linked to the carboxy terminal amino acid of the glucagon peptide. In some embodiments the glucagon fusion peptide comprises SEQ ID NO: 802, SEQ ID NO: 803, SEQ ID NO: 804, SEQ ID NO: 805 and SEQ ID NO: 806 or a glucagon agonist analog thereof, further comprising an amino acid sequence of SEQ ID NO: 820 (GPSSGAPPPS), SEQ ID NO: 821 (KRNRNNIA) or SEQ ID NO: 822 (KRNR) linked to amino acid 29 of the glucagon peptide. In accordance with some embodiments the fusion peptide further comprises a PEG chain linked to an amino acid at position 16, 17, 21, 24, 29, within a C-terminal extension, or at the C-terminal amino acid, wherein the PEG chain is selected from the range of 500 to 40,000 Daltons. In some embodiments the amino acid sequence of SEQ ID NO: 820 (GPSSGAPPPS), SEQ ID NO: 821 (KRNRNNIA) or SEQ ID NO: 822 (KRNR) is bound to amino acid 29 of the glucagon peptide through a peptide bond. In some embodiments the glucagon peptide portion of the glucagon fusion peptide comprises a sequence selected from the group consisting of SEQ ID NO: 810, SEQ ID NO: 811 and SEQ ID NO: 813. In some embodiments the glucagon peptide portion of the glucagon fusion peptide comprises the sequence of SEQ ID NO: 811 or SEQ ID NO: 813, wherein a PEG chain is linked at position 21, 24, 29, within a C-terminal extension or at the C-terminal amino acid, respectively.

[0260] In another embodiment the glucagon peptide sequence of the fusion peptide comprises the sequence of SEQ ID NO: 811, further comprising an amino acid sequence of SEQ ID NO: 820 (GPSSGAPPPS), SEQ ID NO: 821 (KRNRNNIA) or SEQ ID NO: 822 (KRNR) linked to amino acid 29 of the glucagon peptide. In some embodiments the glucagon fusion peptide comprises a sequence selected from the group consisting of SEQ ID NO: 824, SEQ ID NO: 825 and SEQ ID NO: 826. Typically the fusion peptides of the present invention will have a C-terminal amino acid with the standard carboxylic acid group. However, analogs of those sequences wherein the C-terminal amino acid has an amide substituted for the carboxylic acid are also encompassed as embodiments. In accordance with some embodiments the fusion glucagon peptide comprises a glucagon agonist analog selected from the group consisting of SEQ ID NO: 810, SEQ ID NO: 811 and SEQ ID NO: 813, further comprising an amino acid sequence of SEQ ID NO: 823 (GPSSGAPPPS-CONH₂) linked to amino acid 29 of the glucagon peptide.

[0261] The glucagon agonists of the present invention can be further modified to improve the peptide's solubility and stability in aqueous solutions while retaining the biological activity of the glucagon peptide. In accordance with some embodiments, introduction of hydrophilic groups at one or more positions selected from positions 16, 17, 20, 21, 24 and 29 of the peptide of SEQ ID NO: 811, or a glucagon agonist analog thereof, are anticipated to improve the solubility and stability of the pH stabilize glucagon analog. More particularly, in some embodiments the glucagon peptide of SEQ ID NO: 810, SEQ ID NO: 811, SEQ ID NO: 813, or SEQ ID NO: 832 is modified to comprise one or more hydrophilic groups covalently linked to the side of amino acids present at positions 21 and 24 of the glucagon peptide.

[0262] In accordance with some embodiments, the glucagon peptide of SEQ ID NO: 811 is modified to contain one or more amino acid substitution at positions 16, 17, 20, 21, 24 and/or 29, wherein the native amino acid is substituted with an amino acid having a side chain suitable for crosslinking with hydrophilic moieties, including for example, PEG. The native peptide can be substituted with a naturally occurring amino acid or a synthetic (non-naturally occurring) amino acid. Synthetic or non-naturally occurring amino acids refer to amino acids that do not naturally occur in vivo but which, nevertheless, can be incorporated into the peptide structures described herein.

[0263] In some embodiments, a glucagon agonist of SEQ ID NO: 810, SEQ ID NO: 811 or SEQ ID NO: 813 is provided wherein the native glucagon peptide sequence has been modified to contain a naturally occurring or synthetic amino acid in at least one of positions 16, 17, 21, 24, 29, within a C-terminal extension or at the C-terminal amino acid of the native sequence, wherein the amino acid substitute further comprises a hydrophilic moiety. In some embodiments the substitution is at position 21 or 24, and in a further embodiment the hydrophilic moiety is a PEG chain. In some embodiments the glucagon peptide of SEQ ID NO: 811 is substituted with at least one cysteine residue, wherein the side chain of the cysteine residue is further modified with a thiol reactive reagent, including for example, maleimido, vinyl sulfone, 2-pyridylthio, haloalkyl, and haloacyl. These thiol reactive reagents may contain carboxy, keto, hydroxyl, and ether groups as well as other hydrophilic moieties such as polyethylene glycol units. In an alternative embodiment, the native glucagon peptide is substituted with lysine, and the side chain of the substituting lysine residue is further modified using amine reactive reagents such as active esters (succinimido, anhydride, etc) of carboxylic acids or aldehydes of hydrophilic moieties such as polyethylene glycol. In some embodiments the glucagon peptide is selected form the group consisting of SEQ ID NO: 814, SEQ ID NO: 815, SEQ ID NO: 816, SEQ ID NO: 817, SEQ ID NO: 818 and SEQ ID NO: 819.

[0264] In accordance with some embodiments the pegylated glucagon peptide comprises two or more polyethylene glycol chains covalently bound to the glucagon peptide wherein the total molecular weight of the glucagon chains is about 1,000 to about 5,000 Daltons. In some embodiments the pegylated glucagon agonist comprises a peptide of SEQ ID NO: 806, wherein a PEG chain is covalently linked to the amino acid residue at position 21 and at position 24, and wherein the combined molecular weight of the two PEG chains is about 1,000 to about 5,000 Daltons. In another embodiment the pegylated glucagon agonist comprises a peptide of SEQ ID NO: 806, wherein a PEG chain is covalently linked to the amino acid residue at position 21 and at position 24, and wherein the combined molecular weight of the two PEG chains is about 5,000 to about 20,000 Daltons.

[0265] The polyethylene glycol chain may be in the form of a straight chain or it may be branched. In accordance with some embodiments the polyethylene glycol chain has an average molecular weight selected from the range of about 500 to about 40,000 Daltons. In some embodiments the polyethylene glycol chain has a molecular weight selected from the range of about 500 to about 5,000 Daltons. In another embodiment the polyethylene glycol chain has a molecular weight of about 20,000 to about 40,000 Daltons.

[0266] Any of the glucagon peptides described above may be further modified to include a covalent or non-covalent intramolecular bridge or an alpha helix-stabilizing amino acid within the C-terminal portion of the glucagon peptide (amino acid positions 12-29). In accordance with some embodiments, the glucagon peptide comprises any one or more of the modifications discussed above in addition to an amino acid substitution at positions 16, 20, 21, or 24 (or a combination thereof) with an α,α-disubstituted amino acid, e.g., Aib. In accordance with another embodiment, the glucagon peptide comprises any one or more modifications discussed above in addition to an intramolecular bridge, e.g., a lactam, between the side chains of the amino acids at positions 16 and 20 of the glucagon peptide.

[0267] In accordance with some embodiments, the glucagon peptide comprises the amino acid sequence of SEQ ID NO: 877, wherein the Xaa at position 3 is an amino acid comprising a side chain of Structure I, II, or III:

[chemical structure]

wherein R¹ is C₀₋₃ alkyl or C₀₋₃ heteroalkyl; R² is NHR⁴ or C₁₋₃ alkyl; R³ is C₁₋₃ alkyl; R⁴ is H or C₁₋₃ alkyl; X is NH, O, or S; and Y is NHR⁴, SR³, or OR³. In some embodiments, X is NH or Y is NHR⁴. In some embodiments, R¹ is C₀₋₂ alkyl or C₁ heteroalkyl. In some embodiments, R² is NHR⁴ or C₁ alkyl. In some embodiments, R⁴ is H or C¹ alkyl. In exemplary embodiments an amino acid comprising a side chain of Structure I is provided wherein, R¹ is CH₂—S, X is NH, and R² is CH₃ (acetamidomethyl-cysteine, C(Acm)); R¹ is CH₂, X is NH, and R² is CH₃ (acetyldiaminobutanoic acid, Dab(Ac)); R¹ is C₀ alkyl, X is NH, R² is NHR⁴, and R⁴ is H (carbamoyldiaminopropanoic acid, Dap(urea)); or R¹ is CH₂—CH₂, X is NH, and R² is CH₃ (acetylornithine, Orn(Ac)). In exemplary embodiments an amino acid comprising a side chain of Structure II is provided, wherein R¹ is CH₂, Y is NHR⁴, and R⁴ is CH₃ (methylglutamine, Q(Me)); In exemplary embodiments an amino acid comprising a side chain of Structure III is provided wherein, R¹ is CH₂ and R⁴ is H (methionine-sulfoxide, M(O)); In specific embodiments, the amino acid at position 3 is substituted with Dab(Ac). For example, glucagon agonists can comprise the amino acid sequence of SEQ ID NO: 863, SEQ ID NO: 869, SEQ ID NO: 871, SEQ ID NO: 872, SEQ ID NO: 873, and SEQ ID NO: 874.

[0268] In certain embodiments, the glucagon peptide is an analog of the glucagon peptide of SEQ ID NO: 877. In specific aspects, the analog comprises any of the amino acid modifications described herein, including, but not limited to: a substitution of Asn at position 28 with a charged amino acid; a substitution of Asn at position 28 with a charged amino acid selected from the group consisting of Lys, Arg, His, Asp, Glu, cysteic acid, and homocysteic acid; a substitution at position 28 with Asn, Asp, or Glu; a substitution at position 28 with Asp; a substitution at position 28 with Glu; a substitution of Thr at position 29 with a charged amino acid; a substitution of Thr at position 29 with a charged amino acid selected from the group consisting of Lys, Arg, His, Asp, Glu, cysteic acid, and homocysteic acid; a substitution at position 29 with Asp, Glu, or Lys; a substitution at position 29 with Glu; a insertion of 1-3 charged amino acids after position 29; an insertion after position 29 of Glu or Lys; an insertion after position 29 of Gly-Lys or Lys-Lys; and a combination thereof.

[0269] In certain embodiments, the analog of the glucagon peptide of SEQ ID NO: 877 comprises an α,α-disubstituted amino acid, such as Aib, at one, two, three, or all of positions 16, 20, 21, and 24.

[0270] In certain embodiments, the analog of the glucagon peptide of SEQ ID NO: 877 comprises one or more of the following: substitution of His at position 1 with a non-native amino acid that reduces susceptibility of the glucagon peptide to cleavage by dipeptidyl peptidase IV (DPP-IV), substitution of Ser at position 2 with a non-native amino acid that reduces susceptibility of the glucagon peptide to cleavage by dipeptidyl peptidase IV (DPP-IV), substitution of Thr at position 7 with an amino acid lacking a hydroxyl group, e.g., Abu or Ile; substitution of Tyr at position 10 with Phe or Val; substitution of Lys at position 12 with Arg; substitution of Asp at position 15 with Glu, substitution of Ser at position 16 with Thr or Aib; substitution of Gln at position 20 with Ala or Aib; substitution of Asp at position 21 with Glu; substitution of Gln at position 24 with Ala or Aib; substitution of Met at position 27 with Leu or Nle; deletion of amino acids at positions 27-29; deletion of amino acids at positions 28-29; deletion of the amino acid at positions 29; addition of the amino acid sequence of SEQ ID NO: 820 to the C-terminus, wherein the amino acid at position 29 is Thr or Gly, or a combination thereof.

[0271] In accordance with specific embodiments, the glucagon peptide comprises the amino acid sequence of any of SEQ ID NOs: 862-867 and 869-874.

[0272] In certain embodiments, the analog of the glucagon peptide comprising SEQ ID NO: 877 comprises a hydrophilic moiety, e.g., PEG, covalently linked to the amino acid at any of positions 16, 17, 20, 21, 24, and 29 or at the C-terminal amino acid.

[0273] In certain embodiments, the glucagon agonist peptide comprises the sequence of SEQ ID NO: 877 wherein an amino acid comprising a side chain is covalently attached, optionally through a spacer, to an acyl group or an alkyl group, which acyl group or alkyl group is non-native to a naturally-occurring amino acid. In one embodiment the covalently linked acyl or alkyl group has a carboxylate at its free end. The acyl group in some embodiments is a C4 to C30 fatty acyl group, optionally with carboxylate groups at each end. In one embodiment the glucagon agonist peptide comprises a covalently linked C4 to C30 acyl group optionally with a carboxylate at its free end. In specific aspects, the acyl group or alkyl group is covalently attached to the side chain of the amino acid at position 10. In some embodiments, the amino acid at position 7 is Be or Abu.

[0274] The glucagon agonist may be a peptide comprising the amino acid sequence of any of the SEQ ID NOs: 1-919, optionally with up to 1, 2, 3, 4, or 5 further modifications that retain glucagon agonist activity. In certain embodiments, the glucagon agonist comprises the amino acids of any of SEQ ID NOs: 859-919.

[0275] In accordance with one embodiment Q is a glucagon analog comprising the sequence X₁X₂X₃GTFTSDYSX₁₂YLX₁₅X₁₆RRAQX₂₁FVX₂₁WLX₂₇X₂₈X₂₉ (SEQ ID NO: 920)

wherein

[0276] X₁ is selected from the group consisting of His, D-His, N-methyl-His, alpha-methyl-His, imidazole acetic acid, des-amino-His, hydroxyl-His, acetyl-His, homo-His, or alpha, alpha-dimethyl imidiazole acetic acid (DMIA);

[0277] X₂ is selected from the group consisting of Ser, D-Ser, Ala, D-Ala, Gly, N-methyl-Ser, Aib, Val, or α-amino-N-butyric acid;

[0278] X₃ is an amino acid comprising a side chain of Structure I, II, or III:

[chemical structure]

[0279] wherein R¹ is C₀₋₃ alkyl or C₀₋₃ heteroalkyl; R² is NHR⁴ or C₁₋₃ alkyl; R³ is C₁₋₃ alkyl; R⁴ is H or C₁₋₃ alkyl; X is NH, O, or S; and Y is NHR⁴, SR³, or OR³;

[0280] X₁₂ is Lys or Arg;

[0281] X₁₅ is Asp, Glu, cysteic acid, homoglutamic acid or homocysteic acid;

[0282] X₁₆ is Ser, glutamine, homoglutamic acid, homocysteic acid, Thr or Aib,

[0283] X₂₁ is Asp, Lys, Cys, Orn, homocysteine or acetyl phenylalanine;

[0284] X₂₄ is Gln, Lys, Cys, Orn, homocysteine or acetyl phenylalanine;

[0285] X₂₇ is Met, Leu or Nle;

[0286] X₂₈ is Asn, Lys, Arg, His, Asp or Glu; and

[0287] X₂₉ is Thr, Lys, Arg, His, Gly, Asp or Glu, optionally with up to 3 additional conservative amino acid substitutions at positions selected from 5, 7, 10, 11, 13, 14, 17, 18, 19, or 20, and optionally wherein the glucagon agonist peptide further comprises a C-terminal extension of SEQ ID NO: 26 (GPSSGAPPPSX₄₀), SEQ ID NO: 27 (KRNRNNIAX₄₀) or SEQ ID NO: 28 (KRNRX₄₀) is bound to amino acid 29 of the glucagon peptide through a peptide bond, wherein X₄₀ is an amino acid selected from the group consisting of Cys or Lys.

[0288] In accordance with one embodiment Q is a glucagon analog comprising the sequence

[0289] HX₂QGTFTSDYSX₁₂YLX₁₅X₁₆RRAQX₂₁FVX₂₄WLX₂₇X₂₈X₂₉ (SEQ ID NO: 921)

[0290] wherein

[0291] X₂ is selected from the group consisting of Ser, D-Ser, Ala, D-Ala, Gly, N-methyl-Ser, Aib, Val, or α-amino-N-butyric acid;

[0292] X₁₂ is Lys or Arg;

[0293] X₁₅ is Asp or Glu;

[0294] X₁₆ is Ser, Thr or Aib,

[0295] X₂₁ is Asp, Lys, Cys, Orn, homocysteine or acetyl phenylalanine;

[0296] X₂₄ is Gln, Lys, Cys, Orn, homocysteine or acetyl phenylalanine;

[0297] X₂₇ is Met, Leu or Nle;

[0298] X₂₈ is Asn, Lys, Arg, His, Asp or Glu; and

[0299] X₂₉ is Thr, Lys, Arg, His, Gly, Asp or Glu, optionally wherein the glucagon agonist peptide further comprises a C-terminal extension of SEQ ID NO: 26 (GPSSGAPPPSX₄₀), SEQ ID NO: 27 (KRNRNNIAX₄₀) or SEQ ID NO: 28 (KRNRX₄₀) is bound to amino acid 29 of the glucagon peptide through a peptide bond, wherein X₄₀ is an amino acid selected from the group consisting of Cys or Lys.

[0300] In accordance with one embodiment Q is a glucagon analog comprising the sequence HX₂QGTFTSDYSX₁₂YLX₁₅X₁₆RRAQDFVQWLX₂₇X₂₈X₂₉ (SEQ ID NO: 922)

wherein
X₂ is selected from the group consisting of Ser, D-Ser, Ala, D-Ala, Gly, N-methyl-Ser, Aib, Val, or α-amino-N-butyric acid;

### X₁₂ is Lys or Arg;

### X₁₅ is Asp or Glu;

### X₁₆ is Ser, Thr or Aib,

### X₂₇ is Met, Leu or Nle;

### X₂₈ is Asn, Lys, Arg, His, Asp or Glu; and

[0301] X₂₉ is Thr, Lys, Arg, His, Gly, Asp or Glu, optionally wherein the glucagon agonist peptide further comprises a C-terminal extension of SEQ ID NO: 26 (GPSSGAPPPSX₄₀), SEQ ID NO: 27 (KRNRNNIAX₄₀) or SEQ ID NO: 28 (KRNRX₄₀) is bound to amino acid 29 of the glucagon peptide through a peptide bond, wherein X₄₀ is an amino acid selected from the group consisting of Cys or Lys.

[0302] In accordance with one embodiment Q is a glucagon analog comprising the sequence of SEQ ID NO: 1 modified by comprising at least one amino acid modification selected from the group consisting of a substitution at position 28 with Asn, Asp, or Glu;

[0303] substitution at position 28 with Asp;

[0304] substitution at position 28 with Glu;

[0305] substitution of Thr at position 29 with a charged amino acid;

[0306] substitution of Thr at position 29 with a charged amino acid selected from the group consisting of Lys, Arg, His, Asp, Glu, cysteic acid, and homocysteic acid;

[0307] substitution at position 29 with Asp, Glu, or Lys;

[0308] substitution at position 29 with Glu or Gly;

[0309] insertion of 1-3 charged amino acids after position 29;

[0310] insertion after position 29 of Glu or Lys; or insertion after position 29 of Gly-Lys or Lys-Lys, optionally wherein the glucagon agonist peptide further comprises a C-terminal extension of SEQ ID NO: 26 (GPSSGAPPPSX₄₀), SEQ ID NO: 27 (KRNRNNIAX₄₀) or SEQ ID NO: 28 (KRNRX₄₀) is bound to amino acid 29 of the glucagon peptide through a peptide bond, wherein X₄₀ is an amino acid selected from the group consisting of Cys or Lys. In a further embodiment Q is a glucagon analog comprising the sequence HX₂QGTFTSDYSX₁₂YLX₁₅X₁₆RRAQDFVQWLX₂₇X₂₈GGPSSGAPPPSX₄₀ (SEQ ID NO: 923) wherein

[0311] X₂ is selected from the group consisting of Ser, D-Ser, Ala, D-Ala, Gly, N-methyl-Ser, Aib, Val, or α-amino-N-butyric acid;

[0312] X₁₂ is Lys or Arg;

[0313] X₁₅ is Asp or Glu;

[0314] X₁₆ is Ser, Thr or Aib,

[0315] X₂₇ is Met, Leu or Nle;

[0316] X₂₈ is Asn, Lys, Arg, His, Asp or Glu; and

[0317] X₄₀ is Cys or Lys. In one embodiment the glucagon peptide is SEQ ID NO: 923, wherein X₂ of is Aib or D-Ser and X₁₆ is Aib.

[0318] In accordance with one embodiment Q is a glucagon analog comprising the sequence HX₂QGTFTSDYSX₁₂YLDSRRAQDFVQWLX₂₇X₂₈GGPSSGAPPPSX₄₀ (SEQ ID NO: 924)

wherein

[0319] X₂ is selected from the group consisting of Ser, D-Ser, Ala, D-Ala, Gly, N-methyl-Ser, Aib, Val, or α-amino-N-butyric acid;

[0320] X₁₂ is Lys or Arg;

[0321] X₂₇ is Met, Leu or Nle;

[0322] X₂₈ is Asn, Lys, Arg, His, Asp or Glu; and

[0323] X₄₀ is an amino acid selected from the group consisting of Cys or Lys. In one embodiment X₂ of SEQ ID NO: 924 is Aib or D-Ser.

[0324] In one embodiment Q comprises the amino acid sequence:

His-X₂-Gln-Gly-Thr-Phe-Thr-Ser-Asp-Tyr-Ser-Lys-Tyr-Leu-Asp-Ser-Arg-Arg-Ala-Gln-Asp-Phe-Val-Gln-Trp-Leu-Met-Z (SEQ ID NO: 839) with 1 to 3 amino acid modifications thereto,
(a) wherein X₂ is a non-native amino acid (relative to SEQ ID NO: 1) that reduces susceptibility of the glucagon peptide to cleavage by dipeptidyl peptidase IV (DPP-IV),
(b) wherein Z is selected from the group consisting of —COOH, -Asn-COOH, Asn-Thr-COOH, and W—COOH, wherein W is selected from the group consisting of GPSSGAPPPS, GGPSSGAPPPS, NGGPSSGAPPPS and NGGPSSGAPPPSK, wherein Q exhibits glucagon agonist activity. In one embodiment Q comprises the amino acid sequence:
His-X₂-Gln-Gly-Thr-Phe-Thr-Ser-Asp-Tyr-Ser-Lys-Tyr-Leu-Asp-Ser-Arg-Arg-Ala-Gln-Asp-Phe-Val-Gln-Trp-Leu-Met-Gly-Gly-Pro-Ser-Ser-Gly-Ala-Pro-Pro-Pro-X₄₀ (SEQ ID NO: 935) wherein X₂ is Aib or D-Ser and X₄₀ is Lys or Cys. In one embodiment Q comprises the peptide of SEQ ID NO: 935 wherein X₂ is D-Ser and X₄₀ is Lys.

[0325] In accordance with one embodiment L-Y is covalently conjugated to the N-terminus, C-terminus, or an amino acid side chain of Q. More particularly, L-Y is covalently conjugated to an amino acid side chain of an amino acid at position 10, 30, 37, 38, 39, 40, 41, 42, or 43 of Q, and L is an amino acid or dipeptide. In one embodiment the carboxylate group of 3,5,3′,5′-tetra-iodothyronine or 3,5,3′-triiodo L-thyronine is covalently linked to an amine of Q to form an amide bond.

### Structure of L

[0326] In some embodiments, L is a bond. In these embodiments, Q and Y are conjugated together by reacting a nucleophilic reactive moiety on Q with and electrophilic reactive moiety on Y. In alternative embodiments, Q and Y are conjugated together by reacting an electrophilic reactive moiety on Q with a nucleophilic moiety on Y. In exemplary embodiments, L is an amide bond that forms upon reaction of an amine on Q (e.g. an ε-amine of a lysine residue) with a carboxyl group on Y. In alternative embodiments, Q and or Y are derivatized with a derivatizing agent before conjugation.

[0327] In some embodiments, L is a linking group. In some embodiments, L is a bifunctional linker and comprises only two reactive groups before conjugation to Q and Y. In embodiments where both Q and Y have electrophilic reactive groups, L comprises two of the same or two different nucleophilic groups (e.g. amine, hydroxyl, thiol) before conjugation to Q and Y. In embodiments where both Q and Y have nucleophilic reactive groups, L comprises two of the same or two different electrophilic groups (e.g. carboxyl group, activated form of a carboxyl group, compound with a leaving group) before conjugation to Q and Y. In embodiments where one of Q or Y has a nucleophilic reactive group and the other of Q or Y has an electrophilic reactive group, L comprises one nucleophilic reactive group and one electrophilic group before conjugation to Q and Y.

[0328] L can be any molecule with at least two reactive groups (before conjugation to Q and Y) capable of reacting with each of Q and Y. In some embodiments L has only two reactive groups and is bifunctional. L (before conjugation to the peptides) can be represented by Formula VI:

[chemical structure]

wherein A and B are independently nucleophilic or electrophilic reactive groups. In some embodiments A and B are either both nucleophilic groups or both electrophilic groups. In some embodiments one of A or B is a nucleophilic group and the other of A or B is an electrophilic group.

[0329] In some embodiments, L comprises a chain of atoms from 1 to about 60, or 1 to 30 atoms or longer, 2 to 5 atoms, 2 to 10 atoms, 5 to 10 atoms, or 10 to 20 atoms long. In some embodiments, the chain atoms are all carbon atoms. In some embodiments, the chain atoms in the backbone of the linker are selected from the group consisting of C, O, N, and S. Chain atoms and linkers may be selected according to their expected solubility (hydrophilicity) so as to provide a more soluble conjugate. In some embodiments, L provides a functional group that is subject to cleavage by an enzyme or other catalyst or hydrolytic conditions found in the target tissue or organ or cell. In some embodiments, the length of L is long enough to reduce the potential for steric hindrance.

[0330] In some embodiments, the linking group is hydrophilic such as, for example, polyalkylene glycol. Before conjugation to the peptides of the composition, the hydrophilic linking group comprises at least two reactive groups (A and B), as described herein and as shown below:

[chemical structure]

In specific embodiments, the linking group is polyethylene glycol (PEG). The PEG in certain embodiments has a molecular weight of about 100 Daltons to about 10,000 Daltons, e.g. about 500 Daltons to about 5000 Daltons. The PEG in some embodiments has a molecular weight of about 10,000 Daltons to about 40,000 Daltons.

[0331] In some embodiments, the hydrophilic linking group comprises either a maleimido or an iodoacetyl group and either a carboxylic acid or an activated carboxylic acid (e.g. NHS ester) as the reactive groups. In these embodiments, the maleimido or iodoacetyl group can be coupled to a thiol moiety on Q or Y and the carboxylic acid or activated carboxylic acid can be coupled to an amine on Q or Y with or without the use of a coupling reagent. Any appropriate coupling agent known to one skilled in the art can be used to couple the carboxylic acid with the amine. In some embodiments, the linking group is maleimido-PEG(20 kDa)-COOH, iodoacetyl-PEG(20 kDa)-COOH, maleimido-PEG(20 kDa)-NHS, or iodoacetyl-PEG(20 kDa)-NHS.

[0332] In some embodiments, the linking group is comprised of an amino acid, a dipeptide, a tripeptide, or a polypeptide, wherein the amino acid, dipeptide, tripeptide, or polypeptide comprises at least two activating groups, as described herein. In some embodiments, the linking group (L) comprises a moiety selected from the group consisting of: amino, ether, thioether, maleimido, disulfide, amide, ester, thioester, alkene, cycloalkene, alkyne, trizoyl, carbamate, carbonate, cathepsin B-cleavable, and hydrazone. In some embodiments, the linking group is an amino acid selected from the group Asp, Glu, homoglutamic acid, homocysteic acid, cysteic acid, gamma-glutamic acid. In some embodiments, the linking group is a dipeptide selected from the group consisting of: Ala-Ala, β-Ala-β-Ala, Leu-Leu, Pro-Pro, γ-aminobutyric acid-γ-aminobutyric acid, and γ-Glu-γ-Glu. In one embodiment L comprises gamma-glutamic acid.

[0333] In embodiments where Q and Y are conjugated together by reacting a carboxylic acid with an amine, an activating agent can be used to form an activated ester of the carboxylic acid. The activated ester of the carboxylic acid can be, for example, N-hydroxysuccinimide (NHS), tosylate (Tos), mesylate, triflate, a carbodiimide, or a hexafluorophosphate. In some embodiments, the carbodiimide is 1,3-dicyclohexylcarbodiimide (DCC), 1,1′-carbonyldiimidazole (CDI), 1-ethyl-3-(3-dimethylaminopropyl)carbodiimide hydrochloride (EDC), or 1,3-diisopropylcarbodiimide (DICD). In some embodiments, the hexafluorophosphate is selected from a group consisting of hexafluorophosphate benzotriazol-1-yl-oxy-tris(dimethylamino)phosphonium hexafluorophosphate (BOP), benzotriazol-1-yl-oxytripyrrolidinophosphonium hexafluorophosphate (PyBOP), 2-(1H-7-azabenzotriazol-1-yl)-1,1,3,3-tetramethyl uronium hexafluorophosphate (HATU), and o-benzotriazole-N,N,N′,N′-tetramethyl-uronium-hexafluoro-phosphate (HBTU).

[0334] In some embodiments, Q comprises a nucleophilic reactive group (e.g. the amino group, thiol group, or hydroxyl group of the side chain of lysine, cysteine or serine) that is capable of conjugating to an electrophilic reactive group on Y or L. In some embodiments, Q comprises an electrophilic reactive group (e.g. the carboxylate group of the side chain of Asp or Glu) that is capable of conjugating to a nucleophilic reactive group on Y or L. In some embodiments, Q is chemically modified to comprise a reactive group that is capable of conjugating directly to Y or to L. In some embodiments, Q is modified at the C-terminal to comprise a natural or nonnatural amino acid with a nucleophilic side chain, such as an amino acid represented by Formula I, Formula II, or Formula III, as previously described herein (see Acylation and alkylation). In exemplary embodiments, the C-terminal amino acid of Q is selected from the group consisting of lysine, ornithine, serine, cysteine, and homocysteine. For example, the C-terminal amino acid of Q can be modified to comprise a lysine residue. In some embodiments, Q is modified at the C-terminal amino acid to comprise a natural or nonnatural amino acid with an electrophilic side chain such as, for example, Asp and Glu. In some embodiments, an internal amino acid of Q is substituted with a natural or nonnatural amino acid having a nucleophilic side chain, such as an amino acid represented by Formula I, Formula II, or Formula III, as previously described herein (see Acylation and alkylation). In exemplary embodiments, the internal amino acid of Q that is substituted is selected from the group consisting of lysine, ornithine, serine, cysteine, and homocysteine. For example, an internal amino acid of Q can be substituted with a lysine residue. In some embodiments, an internal amino acid of Q is substituted with a natural or nonnatural amino acid with an electrophilic side chain, such as, for example, Asp and Glu.

[0335] In some embodiments, Y comprises a reactive group that is capable of conjugating directly to Q or to L. In some embodiments, Y comprises a nucleophilic reactive group (e.g. amine, thiol, hydroxyl) that is capable of conjugating to an electrophilic reactive group on Q or L. In some embodiments, Y comprises electrophilic reactive group (e.g. carboxyl group, activated form of a carboxyl group, compound with a leaving group) that is capable of conjugating to a nucleophilic reactive group on Q or L.

Stability of L in vivo

[0336] In some embodiments, L is stable in vivo. In some embodiments, L is stable in blood serum for at least 5 minutes, e.g. less than 25%, 20%, 15%, 10% or 5% of the conjugate is cleaved when incubated in serum for a period of 5 minutes. In other embodiments, L is stable in blood serum for at least 10, or 20, or 25, or 30, or 60, or 90, or 120 minutes, or 3, 4, 5, 6, 7, 8, 9, 10, 12, 15, 18 or 24 hours. In these embodiments, L does not comprise a functional group that is capable of undergoing hydrolysis in vivo. In some exemplary embodiments, L is stable in blood serum for at least about 72 hours. Nonlimiting examples of functional groups that are not capable of undergoing significant hydrolysis in vivo include amides, ethers, and thioethers. For example, the following compound is not capable of undergoing significant hydrolysis in vivo:

[chemical structure]

[0337] In some embodiments, L is hydrolyzable in vivo. In these embodiments, L comprises a functional group that is capable of undergoing hydrolysis in vivo. Nonlimiting examples of functional groups that are capable of undergoing hydrolysis in vivo include esters, anhydrides, and thioesters. For example the following compound is capable of undergoing hydrolysis in vivo because it comprises an ester group:

[chemical structure]

[0338] In some exemplary embodiments L is labile and undergoes substantial hydrolysis within 3 hours in blood plasma at 37° C., with complete hydrolysis within 6 hours. In some exemplary embodiments, L is not labile.

[0339] In some embodiments, L is metastable in vivo. In these embodiments, L comprises a functional group that is capable of being chemically or enzymatically cleaved in vivo (e.g., an acid-labile, reduction-labile, or enzyme-labile functional group), optionally over a period of time. In these embodiments, L can comprise, for example, a hydrazone moiety, a disulfide moiety, or a cathepsin-cleavable moiety. When L is metastable, and without intending to be bound by any particular theory, the Q-L-Y conjugate is stable in an extracellular environment, e.g., stable in blood serum for the time periods described above, but labile in the intracellular environment or conditions that mimic the intracellular environment, so that it cleaves upon entry into a cell. In some embodiments when L is metastable, L is stable in blood serum for at least about 24, 25, 26, 27, 28, 29, 30, 31, 32, 33, 34, 35, 36, 42, or 48 hours, for example, at least about 48, 54, 60, 66, or 72 hours, or about 24-48, 48-72, 24-60, 36-48, 36-72, or 48-72 hours.

[0340] In accordance with one embodiment L-Y comprises the structure:

[chemical structure]

[0341] wherein

[0342] L is a bond, an amino acid, or dipeptide joining Q to Y; and

[0343] R₁₅ is H or I. In one embodiment L is γ-Glu or the dipeptide, γ-Glu-γ-Glu. In one embodiment L-Y comprises the structure

[chemical structure]

### Acylation of Q

[0344] In some embodiments, the glucagon agonist peptide, Q is modified to comprise an acyl group. The acyl group can be covalently linked directly to an amino acid of the peptide Q, or indirectly to an amino acid of Q via a spacer, wherein the spacer is positioned between the amino acid of Q and the acyl group. Q may be acylated at the same amino acid position where a hydrophilic moiety is linked, or at a different amino acid position. The glucagon agonist peptide may comprise an acyl group which is non-native to a naturally-occurring amino acid. Acylation can be carried out at any position within Q. Acylation may occur at any position including any of positions 1-29, a position within a C-terminal extension, or the C-terminal amino acid, provided that the activity exhibited by the non-acylated glucagon agonist peptide is retained upon acylation. For example, if the unacylated peptide has glucagon agonist activity, then the acylated peptide retains the glucagon agonist activity. Nonlimiting examples include acylation at positions 5, 7, 10, 11, 12, 13, 14, 16, 17, 18, 19, 20, 21, 24, 27, 28, or 29 (according to the amino acid numbering of wild type glucagon) or at positions 30, 37, 38, 39, 40, 41, 42, or 43 of a C-terminal extended glucagon agonist peptide (according to the amino acid numbering of wild type glucagon). Other nonlimiting examples include acylation at position 10 (according to the amino acid numbering of the wild type glucagon) and pegylation at one or more positions in the C-terminal portion of the glucagon peptide, e.g., position 24, 28 or 29 (according to the amino acid numbering of the wild type glucagon), within a C-terminal extension, or at the C-terminus (e.g., through adding a C-terminal Cys). In one embodiment the acyl group is a C4 to C30 fatty acyl group, optionally with carboxylate groups at each end. In other embodiments, the acyl group is a C16, C18 or C20 acyl group optionally with a carboxylate at its free end when linked to the glucagon agonist peptide.

[0345] In a specific aspect of the invention, Q is modified to comprise an acyl group by direct acylation of an amine, hydroxyl, or thiol of a side chain of an amino acid of Q. In some embodiments, Q is directly acylated through the side chain amine, hydroxyl, or thiol of an amino acid. In some embodiments, acylation is at position 10, 20, 24, or 29 (according to the amino acid numbering of the wild type glucagon). In this regard, the acylated glucagon agonist peptide can comprise the amino acid sequence of SEQ ID NO: 1, or a modified amino acid sequence thereof comprising one or more of the amino acid modifications described herein, with at least one of the amino acids at positions 10, 20, 24, and 29 (according to the amino acid numbering of the wild type glucagon) modified to any amino acid comprising a side chain amine, hydroxyl, or thiol. In some specific embodiments of the invention the direct acylation of the Q occurs through the side chain amine, hydroxyl, or thiol of the amino acid at position 10 (according to the amino acid numbering of the wild type glucagon).

[0346] In some embodiments, the acylated amino acid of Q comprises a side chain amine and is an amino acid of Formula I:

[chemical structure]

In some exemplary embodiments, the amino acid of Formula I, is the amino acid wherein n is 4 (Lys) or n is 3 (Orn).

[0347] In other embodiments, the acylated amino acid of Q comprises a side chain hydroxyl and is an amino acid of Formula II:

[chemical structure]

In some exemplary embodiments, the amino acid of Formula II is the amino acid wherein n is 1 (Ser).

[0348] In yet other embodiments, the acylated amino acid of peptide Q comprises a side chain thiol and is an amino acid of Formula III:

[chemical structure]

In some exemplary embodiments, the amino acid of Formula III is the amino acid wherein n is 1 (Cys).

[0349] In yet other embodiments, the amino acid of peptide Q comprising a side chain amine, hydroxyl, or thiol is a disubstituted amino acid comprising the same structure of Formula I, Formula II, or Formula III, except that the hydrogen bonded to the alpha carbon of the amino acid of Formula I, Formula II, or Formula III is replaced with a second side chain.

[0350] In some embodiments of the present disclosure, the acylated peptide Q comprises a spacer between the peptide and the acyl group. In some embodiments, Q is covalently bound to the spacer, which is covalently bound to the acyl group. In some exemplary embodiments, Q is modified to comprise an acyl group by acylation of an amine, hydroxyl, or thiol of a spacer, which spacer is attached to a side chain of an amino acid at position 10, 20, 24, or 29 (according to the amino acid numbering of the wild type glucagon), or at the C-terminal amino acid of the glucagon agonist peptide. The amino acid of peptide Q to which the spacer is attached can be any amino acid comprising a moiety which permits linkage to the spacer. For example, an amino acid comprising a side chain —NH₂, —OH, or —COOH (e.g., Lys, Orn, Ser, Asp, or Glu) is suitable. An amino acid of peptide Q (e.g., a singly or doubly α-substituted amino acid) comprising a side chain —NH₂, —OH, or —COOH (e.g., Lys, Orn, Ser, Asp, or Glu) is also suitable. In some embodiments the acylated glucagon agonist peptide can comprise the amino acid sequence of SEQ ID NO: 1, or a modified amino acid sequence thereof comprising one or more of the amino acid modifications described herein, with at least one of the amino acids at positions 10, 20, 24, and 29 (according to the amino acid numbering of the wild type glucagon) modified to any amino acid comprising a side chain amine, hydroxyl, or carboxylate.

[0351] In some embodiments, the spacer between the peptide Q and the acyl group is an amino acid comprising a side chain amine, hydroxyl, or thiol, or a dipeptide or tripeptide comprising an amino acid comprising a side chain amine, hydroxyl, or thiol. In some embodiments, the amino acid spacer is not γ-Glu. In some embodiments, the dipeptide spacer is not γ-Glu-γ-Glu.

[0352] When acylation occurs through an amine group of the amino acid of the spacer, the acylation can occur through the alpha amine of the amino acid or a side chain amine. In the instance in which the alpha amine is acylated, the spacer amino acid can be any amino acid. For example, the spacer amino acid can be a hydrophobic amino acid, e.g., Gly, Ala, Val, Leu, Ile, Trp, Met, Phe, Tyr. In some embodiments, the spacer amino acid can be, for example, a hydrophobic amino acid, e.g., Gly, Ala, Val, Leu, Ile, Trp, Met, Phe, Tyr, 6-amino hexanoic acid, 5-aminovaleric acid, 7-aminoheptanoic acid, 8-aminooctanoic acid. Alternatively, the spacer amino acid can be an acidic residue, e.g., Asp and Glu. In the instance in which the side chain amine of the spacer amino acid is acylated, the spacer amino acid is an amino acid comprising a side chain amine, e.g., an amino acid of Formula I (e.g., Lys or Orn). In this instance, it is possible for both the alpha amine and the side chain amine of the spacer amino acid to be acylated, such that the peptide is diacylated. Embodiments of the invention include such diacylated molecules.

[0353] When acylation occurs through a hydroxyl group of the amino acid of the spacer, the amino acid or one of the amino acids of the dipeptide or tripeptide can be an amino acid of Formula II. In a specific exemplary embodiment, the amino acid is Ser.

[0354] When acylation occurs through a thiol group of the amino acid of the spacer, the amino acid or one of the amino acids of the dipeptide or tripeptide can be an amino acid of Formula III. In a specific exemplary embodiment, the amino acid is Cys.

[0355] In some embodiments, the spacer comprises a hydrophilic bifunctional spacer. In a specific embodiment, the spacer comprises an amino poly(alkyloxy)carboxylate. In this regard, the spacer can comprise, for example, NH₂(CH₂CH₂O)ₙ(CH₂)ₘCOOH, wherein m is any integer from 1 to 6 and n is any integer from 2 to 12, such as, e.g., 8-amino-3,6-dioxaoctanoic acid, which is commercially available from Peptides International, Inc. (Louisville, Ky.).

[0356] The acylated peptides Q described herein can be further modified to comprise a hydrophilic moiety. In some specific embodiments the hydrophilic moiety can comprise a polyethylene glycol (PEG) chain. The incorporation of a hydrophilic moiety can be accomplished through any suitable means, such as any of the methods described herein. In some embodiments the acylated glucagon agonist peptide can comprise SEQ ID NO: 1, including any of the modifications described herein, in which at least one of the amino acids at position 10, 20, 24, and 29 (according to the amino acid numbering of the wild type glucagon) comprise an acyl group and at least one of the amino acids at position 16, 17, 21, 24, or 29 (according to the amino acid numbering of the wild type glucagon), a position within a C-terminal extension, or the C-terminal amino acid are modified to a Cys, Lys, Orn, homo-Cys, or Ac-Phe, and the side chain of the amino acid is covalently bonded to a hydrophilic moiety (e.g., PEG). In some embodiments the acyl group is attached to position 10 (according to the amino acid numbering of the wild type glucagon), optionally via a spacer comprising Cys, Lys, Orn, homo-Cys, or Ac-Phe, and the hydrophilic moiety is incorporated at a Cys residue at position 24.

[0357] Alternatively, the acylated peptide (Q) can comprise a spacer, wherein the spacer is both acylated and modified to comprise the hydrophilic moiety. Nonlimiting examples of suitable spacers include a spacer comprising one or more amino acids selected from the group consisting of Cys, Lys, Orn, homo-Cys, and Ac-Phe.

### Alkylation of Q

[0358] In some embodiments, Q is modified to comprise an alkyl group. The alkyl group can be covalently linked directly to an amino acid of the peptide Q, or indirectly to an amino acid of Q via a spacer, wherein the spacer is positioned between the amino acid of Q and the alkyl group. The alkyl group can be attached to Q via an ether, thioether, or amino linkage, for example. Q may be alkylated at the same amino acid position where a hydrophilic moiety is linked, or at a different amino acid position. As described herein, Q may comprise an alkyl group which is non-native to a naturally-occurring amino acid. In one embodiment the alkyl group is a C4 to C30 alkyl group, optionally with a carboxylate group at its free end when linked to the glucagon agonist peptide. In other embodiments, the alkyl group is a C16, C18 or C20 alkyl group optionally with a carboxylate at its free end when linked to the glucagon agonist peptide.

[0359] Alkylation can be carried out at any position within Q. Where Q is a glucagon agonist peptide, alkylation may occur at any position including any of positions 1-29, a position within a C-terminal extension, or the C-terminal amino acid, provided that an agonist activity of the unalkyated peptide is retained upon alkylation. Nonlimiting examples include alkylation at positions 5, 7, 10, 11, 12, 13, 14, 16, 17, 18, 19, 20, 21, 24, 27, 28, or 29 (according to the amino acid numbering of wild type glucagon) or at positions 30, 37, 38, 39, 40, 41, 42, or 43 of a C-terminal extended glucagon agonist peptide (according to the amino acid numbering of wild type glucagon). Other nonlimiting examples include alkylation at position 10 (according to the amino acid numbering of wild type glucagon) and pegylation at one or more positions in the C-terminal portion of the glucagon agonist peptide, e.g., position 24, 28 or 29 (according to the amino acid numbering of wild type glucagon), within a C-terminal extension, or at the C-terminus (e.g., through adding a C-terminal Cys).

[0360] In a specific aspect of the invention, peptide Q is modified to comprise an alkyl group by direct alkylation of an amine, hydroxyl, or thiol of a side chain of an amino acid of Q. In some embodiments, Q is directly alkylated through the side chain amine, hydroxyl, or thiol of an amino acid. In some embodiments, where Q is a glucagon agonist peptide, alkylation is at position 10, 20, 24, or 29 (according to the amino acid numbering of wild type glucagon). In this regard, the alkylated glucagon agonist peptide can comprise the amino acid sequence of SEQ ID NO: 1, or a modified amino acid sequence thereof comprising one or more of the amino acid modifications described herein, with at least one of the amino acids at positions 10, 20, 24, and 29 (according to the amino acid numbering of wild type glucagon) modified to any amino acid comprising a side chain amine, hydroxyl, or thiol. In some specific embodiments of the invention, the direct alkylation of Q occurs through the side chain amine, hydroxyl, or thiol of the amino acid at position 10 (according to the amino acid numbering of wild type glucagon).

[0361] In some embodiments, the amino acid of peptide Q comprising a side chain amine is an amino acid of Formula I. In some exemplary embodiments, the amino acid of Formula I, is the amino acid wherein n is 4 (Lys) or n is 3 (Orn). In other embodiments, the amino acid of peptide Q comprising a side chain hydroxyl is an amino acid of Formula II. In some exemplary embodiments, the amino acid of Formula II is the amino acid wherein n is 1 (Ser). In yet other embodiments, the amino acid of peptide Q comprising a side chain thiol is an amino acid of Formula III. In some exemplary embodiments, the amino acid of Formula II is the amino acid wherein n is 1 (Cys).

[0362] In yet other embodiments, the amino acid of peptide Q comprising a side chain amine, hydroxyl, or thiol is a disubstituted amino acid comprising the same structure of Formula I, Formula II, or Formula III, except that the hydrogen bonded to the alpha carbon of the amino acid of Formula I, Formula II, or Formula III is replaced with a second side chain.

[0363] In some embodiments of the invention, the alkylated peptide Q comprises a spacer between the peptide and the alkyl group. In some embodiments, the Q is covalently bound to the spacer, which is covalently bound to the alkyl group. In some exemplary embodiments, peptide Q is modified to comprise an alkyl group by alkylation of an amine, hydroxyl, or thiol of a spacer, which spacer is attached to a side chain of an amino acid at position 10, 20, 24, or 29 (according to the amino acid numbering of wild type glucagon) of Q. The amino acid of peptide Q to which the spacer is attached can be any amino acid comprising a moiety which permits linkage to the spacer. The amino acid of peptide Q to which the spacer is attached can be any amino acid (e.g., a singly α-substituted amino acid or an α,α-disubstituted amino acid) comprising a moiety which permits linkage to the spacer. An amino acid of peptide Q comprising a side chain —NH₂, —OH, or —COOH (e.g., Lys, Orn, Ser, Asp, or Glu) is suitable. In some embodiments the alkylated Q can comprise the amino acid sequence of SEQ ID NO: 1, or a modified amino acid sequence thereof comprising one or more of the amino acid modifications described herein, with at least one of the amino acids at positions 10, 20, 24, and 29 (according to the amino acid numbering of wild type glucagon) modified to any amino acid comprising a side chain amine, hydroxyl, or carboxylate.

[0364] In some embodiments, the spacer between the peptide Q and the alkyl group is an amino acid comprising a side chain amine, hydroxyl, or thiol or a dipeptide or tripeptide comprising an amino acid comprising a side chain amine, hydroxyl, or thiol. In some embodiments, the amino acid spacer is not γ-Glu. In some embodiments, the dipeptide spacer is not γ-Glu-γ-Glu.

[0365] When alkylation occurs through an amine group of the amino acid of the spacer the alkylation can occur through the alpha amine of the amino acid or a side chain amine. In the instance in which the alpha amine is alkylated, the spacer amino acid can be any amino acid. For example, the spacer amino acid can be a hydrophobic amino acid, e.g., Gly, Ala, Val, Leu, Ile, Trp, Met, Phe, Tyr. Alternatively, the spacer amino acid can be an acidic residue, e.g., Asp and Glu. In exemplary embodiments, the spacer amino acid can be a hydrophobic amino acid, e.g., Gly, Ala, Val, Leu, Ile, Trp, Met, Phe, Tyr, 6-amino hexanoic acid, 5-aminovaleric acid, 7-aminoheptanoic acid, 8-aminooctanoic acid. Alternatively, the spacer amino acid can be an acidic residue, e.g., Asp and Glu, provided that the alkylation occurs on the alpha amine of the acidic residue. In the instance in which the side chain amine of the spacer amino acid is alkylated, the spacer amino acid is an amino acid comprising a side chain amine, e.g., an amino acid of Formula I (e.g., Lys or Orn). In this instance, it is possible for both the alpha amine and the side chain amine of the spacer amino acid to be alkylated, such that the peptide is dialkylated. Embodiments of the invention include such dialkylated molecules.

[0366] When alkylation occurs through a hydroxyl group of the amino acid of the spacer, the amino acid or one of the amino acids of the spacer can be an amino acid of Formula II. In a specific exemplary embodiment, the amino acid is Ser.

[0367] When alkylation occurs through a thiol group of the amino acid of the spacer, the amino acid or one of the amino acids of the spacer can be an amino acid of Formula III. In a specific exemplary embodiment, the amino acid is Cys.

[0368] In some embodiments, the spacer comprises a hydrophilic bifunctional spacer. In a specific embodiment, the spacer comprises an amino poly(alkyloxy)carboxylate. In this regard, the spacer can comprise, for example, NH₂(CH₂CH₂O)ₙ(CH₂)ₘCOOH, wherein m is any integer from 1 to 6 and n is any integer from 2 to 12, such as, e.g., 8-amino-3,6-dioxaoctanoic acid, which is commercially available from Peptides International, Inc. (Louisville, Ky.).

[0369] The alkylated peptides (Q) described herein can be further modified to comprise a hydrophilic moiety. In some specific embodiments the hydrophilic moiety can comprise a polyethylene glycol (PEG) chain. The incorporation of a hydrophilic moiety can be accomplished through any suitable means, such as any of the methods described herein. In some embodiments the alkylated Q can comprise SEQ ID NO: 1, or a modified amino acid sequence thereof comprising one or more of the amino acid modifications described herein, in which at least one of the amino acids at position 10, 20, 24, and 29 (according to the amino acid numbering of wild type glucagon) comprise an alkyl group and at least one of the amino acids at position 16, 17, 21, 24, and 29, a position within a C-terminal extension or the C-terminal amino acid are modified to a Cys, Lys, Orn, homo-Cys, or Ac-Phe, and the side chain of the amino acid is covalently bonded to a hydrophilic moiety (e.g., PEG). In some embodiments the alkyl group is attached to position 10 (according to the amino acid numbering of wild type glucagon), optionally via a spacer comprising Cys, Lys, Orn, homo-Cys, or Ac-Phe, and the hydrophilic moiety is incorporated at a Cys residue at position 24.

[0370] Alternatively, the alkylated peptide Q can comprise a spacer, wherein the spacer is both alkylated and modified to comprise the hydrophilic moiety. Nonlimiting examples of suitable spacers include a spacer comprising one or more amino acids selected from the group consisting of Cys, Lys, Orn, homo-Cys, and Ac-Phe.

### Fc Fusion Heterologous Moiety

[0371] In some embodiments Q is conjugated, e.g., fused to an immunoglobulin or portion thereof (e.g. variable region, CDR, or Fc region). Known types of immunoglobulins (Ig) include IgG, IgA, IgE, IgD or IgM. The Fc region is a C-terminal region of an Ig heavy chain, which is responsible for binding to Fc receptors that carry out activities such as recycling (which results in prolonged half-life), antibody dependent cell-mediated cytotoxicity (ADCC), and complement dependent cytotoxicity (CDC).

[0372] For example, according to some definitions the human IgG heavy chain Fc region stretches from Cys226 to the C-terminus of the heavy chain. The “hinge region” generally extends from Glu216 to Pro230 of human IgG1 (hinge regions of other IgG isotypes may be aligned with the IgG1 sequence by aligning the cysteines involved in cysteine bonding). The Fc region of an IgG includes two constant domains, CH2 and CH3. The CH2 domain of a human IgG Fc region usually extends from amino acids 231 to amino acid 341. The CH3 domain of a human IgG Fc region usually extends from amino acids 342 to 447. References made to amino acid numbering of immunoglobulins or immunoglobulin fragments, or regions, are all based on Kabat et al. 1991, Sequences of Proteins of Immunological Interest, U.S. Department of Public Health, Bethesda, Md. In a related embodiment, the Fc region may comprise one or more native or modified constant regions from an immunoglobulin heavy chain, other than CH1, for example, the CH2 and CH3 regions of IgG and IgA, or the CH3 and CH4 regions of IgE.

[0373] Suitable conjugate moieties include portions of immunoglobulin sequence that include the FcRn binding site. FcRn, a salvage receptor, is responsible for recycling immunoglobulins and returning them to circulation in blood. The region of the Fc portion of IgG that binds to the FcRn receptor has been described based on X-ray crystallography (Burmeister et al. 1994, Nature 372:379). The major contact area of the Fc with the FcRn is near the junction of the CH2 and CH3 domains. Fc-FcRn contacts are all within a single Ig heavy chain. The major contact sites include amino acid residues 248, 250-257, 272, 285, 288, 290-291, 308-311, and 314 of the CH2 domain and amino acid residues 385-387, 428, and 433-436 of the CH3 domain.

[0374] Some conjugate moieties may or may not include FcγR binding site(s). FcγR are responsible for ADCC and CDC. Examples of positions within the Fc region that make a direct contact with FcγR are amino acids 234-239 (lower hinge region), amino acids 265-269 (B/C loop), amino acids 297-299 (C′/E loop), and amino acids 327-332 (F/G) loop (Sondermann et al., Nature 406: 267-273, 2000). The lower hinge region of IgE has also been implicated in the FcRI binding (Henry, et al., Biochemistry 36, 15568-15578, 1997). Residues involved in IgA receptor binding are described in Lewis et al., (J Immunol. 175:6694-701, 2005). Amino acid residues involved in IgE receptor binding are described in Sayers et al. (J Biol Chem. 279(34):35320-5, 2004).

[0375] Amino acid modifications may be made to the Fc region of an immunoglobulin. Such variant Fc regions comprise at least one amino acid modification in the CH3 domain of the Fc region (residues 342-447) and/or at least one amino acid modification in the CH2 domain of the Fc region (residues 231-341). Mutations believed to impart an increased affinity for FcRn include T256A, T307A, E380A, and N434A (Shields et al. 2001, J. Biol. Chem. 276:6591). Other mutations may reduce binding of the Fc region to FcγRI, FcγRIIA, FcγRIIB, and/or FcγRIIIA without significantly reducing affinity for FcRn. For example, substitution of the Asn at position 297 of the Fc region with Ala or another amino acid removes a highly conserved N-glycosylation site and may result in reduced immunogenicity with concomitant prolonged half-life of the Fc region, as well as reduced binding to FcγRs (Routledge et al. 1995, Transplantation 60:847; Friend et al. 1999, Transplantation 68:1632; Shields et al. 1995, J. Biol. Chem. 276:6591). Amino acid modifications at positions 233-236 of IgG1 have been made that reduce binding to FcγRs (Ward and Ghetie 1995, Therapeutic Immunology 2:77 and Armour et al. 1999, Eur. J. Immunol. 29:2613). Some exemplary amino acid substitutions are described in U.S. Pat. Nos. 7,355,008 and 7,381,408, each incorporated by reference herein in its entirety.

### Hydrophilic Heterologous Moiety

[0376] In some embodiments, Q described herein is covalently bonded to a hydrophilic moiety. Hydrophilic moieties can be attached to Q under any suitable conditions used to react a protein with an activated polymer molecule. Any means known in the art can be used, including via acylation, reductive alkylation, Michael addition, thiol alkylation or other chemoselective conjugation/ligation methods through a reactive group on the PEG moiety (e.g., an aldehyde, amino, ester, thiol, α-haloacetyl, maleimido or hydrazino group) to a reactive group on the target compound (e.g., an aldehyde, amino, ester, thiol, α-haloacetyl, maleimido or hydrazino group). Activating groups which can be used to link the water soluble polymer to one or more proteins include without limitation sulfone, maleimide, sulfhydryl, thiol, triflate, tresylate, azidirine, oxirane, 5-pyridyl, and alpha-halogenated acyl group (e.g., alpha-iodo acetic acid, alpha-bromoacetic acid, alpha-chloroacetic acid). If attached to the peptide by reductive alkylation, the polymer selected should have a single reactive aldehyde so that the degree of polymerization is controlled. See, for example, Kinstler et al., Adv. Drug. Delivery Rev. 54: 477-485 (2002); Roberts et al., Adv. Drug Delivery Rev. 54: 459-476 (2002); and Zalipsky et al., Adv. Drug Delivery Rev. 16: 157-182 (1995).

[0377] Further activating groups which can be used to link the hydrophilic moiety (water soluble polymer) to a protein include an alpha-halogenated acyl group (e.g., alpha-iodo acetic acid, alpha-bromoacetic acid, alpha-chloroacetic acid). In specific aspects, an amino acid residue of the peptide having a thiol is modified with a hydrophilic moiety such as PEG. In some embodiments, an amino acid on Q comprising a thiol is modified with maleimide-activated PEG in a Michael addition reaction to result in a PEGylated peptide comprising the thioether linkage shown below:

[chemical structure]

[0378] In some embodiments, the thiol of an amino acid of Q is modified with a haloacetyl-activated PEG in a nucleophilic substitution reaction to result in a PEGylated peptide comprising the thioether linkage shown below:

[chemical structure]

[0379] Suitable hydrophilic moieties include polyethylene glycol (PEG), polypropylene glycol, polyoxyethylated polyols (e.g., POG), polyoxyethylated sorbitol, polyoxyethylated glucose, polyoxyethylated glycerol (POG), polyoxyalkylenes, polyethylene glycol propionaldehyde, copolymers of ethylene glycol/propylene glycol, monomethoxy-polyethylene glycol, mono-(C1-C10) alkoxy- or aryloxy-polyethylene glycol, carboxymethylcellulose, polyacetals, polyvinyl alcohol (PVA), polyvinyl pyrrolidone, poly-1,3-dioxolane, poly-1,3,6-trioxane, ethylene/maleic anhydride copolymer, poly (.beta.-amino acids) (either homopolymers or random copolymers), poly(n-vinyl pyrrolidone)polyethylene glycol, propropylene glycol homopolymers (PPG) and other polyakylene oxides, polypropylene oxide/ethylene oxide copolymers, colonic acids or other polysaccharide polymers, Ficoll or dextran and mixtures thereof. Dextrans are polysaccharide polymers of glucose subunits, predominantly linked by α1-6 linkages. Dextran is available in many molecular weight ranges, e.g., about 1 kD to about 100 kD, or from about 5, 10, 15 or 20 kD to about 20, 30, 40, 50, 60, 70, 80 or 90 kD.

[0380] The hydrophilic moiety, e.g., polyethylene glycol chain, in accordance with some embodiments has a molecular weight selected from the range of about 500 to about 40,000 Daltons. In some embodiments the polyethylene glycol chain has a molecular weight selected from the range of about 500 to about 5,000 Daltons, or about 1,000 to about 5,000 Daltons. In another embodiment the hydrophilic moiety, e.g., polyethylene glycol chain, has a molecular weight of about 10,000 to about 20,000 Daltons. In yet other exemplary embodiments the hydrophilic moiety, e.g. polyethylene glycol chain, has a molecular weight of about 20,000 to about 40,000 Daltons.

[0381] Linear or branched hydrophilic polymers are contemplated. Resulting preparations of conjugates may be essentially monodisperse or polydisperse, and may have about 0.5, 0.7, 1, 1.2, 1.5 or 2 polymer moieties per peptide.

[0382] In some embodiments, the native amino acid of the peptide is substituted with an amino acid having a side chain suitable for crosslinking with hydrophilic moieties, to facilitate linkage of the hydrophilic moiety to the peptide. Exemplary amino acids include Cys, Lys, Orn, homo-Cys, or acetyl phenylalanine (Ac-Phe). In other embodiments, an amino acid modified to comprise a hydrophilic group is added to the peptide at the C-terminus.

[0383] In some embodiments, the peptide of the conjugate is conjugated to a hydrophilic moiety, e.g. PEG, via covalent linkage between a side chain of an amino acid of the peptide and the hydrophilic moiety. In some embodiments, the peptide is conjugated to a hydrophilic moiety via the side chain of an amino acid at position 16, 17, 21, 24, 29, 40, a position within a C-terminal extension, or the C-terminal amino acid, or a combination of these positions. In some aspects, the amino acid covalently linked to a hydrophilic moiety (e.g., the amino acid comprising a hydrophilic moiety) is a Cys, Lys, Orn, homo-Cys, or Ac-Phe, and the side chain of the amino acid is covalently bonded to a hydrophilic moiety (e.g., PEG).

### Multimers

[0384] The glucagon agonist peptides, Q may be part of a dimer, trimer or higher order multimer comprising at least two, three, or more peptides bound via a linker, wherein at least one or both peptides is a glucagon related peptide. The dimer may be a homodimer or heterodimer. In some embodiments, the linker is selected from the group consisting of a bifunctional thiol crosslinker and a bi-functional amine crosslinker. In some aspects of the invention, the monomers are connected via terminal amino acids (e.g., N-terminal or C-terminal), via internal amino acids, or via a terminal amino acid of at least one monomer and an internal amino acid of at least one other monomer. In specific aspects, the monomers are not connected via an N-terminal amino acid. In some aspects, the monomers of the multimer are attached together in a “tail-to-tail” orientation in which the C-terminal amino acids of each monomer are attached together. A conjugate moiety may be covalently linked to any of the glucagon related peptides described herein, including a dimer, trimer or higher order multimer.

### Conjugates

[0385] In some embodiments, the peptides (Q) described herein are glycosylated, amidated, carboxylated, phosphorylated, esterified, N-acylated, cyclized via, e.g., a disulfide bridge, or converted into a salt (e.g., an acid addition salt, a basic addition salt), and/or optionally dimerized, multimerized, or polymerized, or conjugated.

[0386] The present disclosure also encompasses conjugates in which Q of Q-L-Y is further linked to a heterologous moiety. The conjugation between Q and the heterologous moiety can be through covalent bonding, non-covalent bonding (e.g. electrostatic interactions, hydrogen bonds, van der Waals interactions, salt bridges, hydrophobic interactions, and the like), or both types of bonding. A variety of non-covalent coupling systems may be used, including biotin-avidin, ligand/receptor, enzyme/substrate, nucleic acid/nucleic acid binding protein, lipid/lipid binding protein, cellular adhesion molecule partners; or any binding partners or fragments thereof which have affinity for each other. In some aspects, the covalent bonds are peptide bonds. The conjugation of Q to the heterologous moiety may be indirect or direct conjugation, the former of which may involve a linker or spacer. Suitable linkers and spacers are known in the art and include, but not limited to, any of the linkers or spacers described herein under the sections “Acylation and alkylation”.

[0387] As used herein, the term “heterologous moiety” is synonymous with the term “conjugate moiety” and refers to any molecule (chemical or biochemical, naturally-occurring or non-coded) which is different from Q to which it is attached. Exemplary conjugate moieties that can be linked to Q include but are not limited to a heterologous peptide or polypeptide (including for example, a plasma protein), a targeting agent, an immunoglobulin or portion thereof (e.g., variable region, CDR, or Fc region), a diagnostic label such as a radioisotope, fluorophore or enzymatic label, a polymer including water soluble polymers, or other therapeutic or diagnostic agents. In some embodiments a conjugate is provided comprising Q and a plasma protein, wherein the plasma protein is selected from the group consisting of albumin, transferin, fibrinogen and globulins. In some embodiments the plasma protein moiety of the conjugate is albumin or transferin. The conjugate in some embodiments comprises Q and one or more of a polypeptide, a nucleic acid molecule, an antibody or fragment thereof, a polymer, a quantum dot, a small molecule, a toxin, a diagnostic agent, a carbohydrate, an amino acid.

### Prodrug Derivative of the Glucagon/T3 Conjugates

[0388] In accordance with one embodiment a non-enzymatic self cleaving dipeptide moiety is provided that can be covalently linked to either the glucagon agonist peptide or the thyroid hormone receptor ligand of the glucagon/T3 conjugate, or both, wherein the dipeptide (and any compound linked to the dipeptide) is released from the conjugate at a predetermined length of time after exposure to physiological conditions. Advantageously, the rate of cleavage depends on the structure and stereochemistry of the dipeptide element and also on the strength of the nucleophile present on the dipeptide that induces cleavage and diketopiperazine or diketomorpholine formation. In one embodiment a complex comprising the glucagon/T3 conjugate and a dipeptide of the structure A-B is provided, wherein A is an amino acid or a hydroxyl acid and B is an N-alkylated amino acid that is linked to the glucagon/T3 conjugate through formation of an amide bond between B and an amine of the glucagon/T3 conjugate. The amino acids of the dipeptide are selected such that a non-enzymatic chemical cleavage of A-B from the drug produces a diketopiperazine or diketomorpholine and the reconstituted native drug.

[0389] In one embodiment a glucagon/T3 conjugate is provided comprising a complex having the general structure of A-B-(Q-L-Y) wherein

[0390] A is an amino acid or a hydroxyl acid;

[0391] B is an N-alkylated amino acid, wherein the dipeptide A-B is covalently linked to an amine (forming an amide bond) of either the glucagon agonist peptide or the thyroid hormone receptor ligand of the glucagon/T3 conjugate. In one embodiment the side chain of A or B of the dipeptide is acylated or alkylated with an hydrocarbon chain of sufficient length to bind plasma proteins. In one embodiment the dipeptide further comprises a depot polymer linked to the side chain of A or B. Chemical cleavage of A-B from Q produces a diketopiperazine or diketomorpholine and releases the active drug to the patient in a controlled manner over a predetermined duration of time after administration.

[0392] In one embodiment the dipeptide element linked to the glucagon/T3 conjugate comprises a compound having the general structure of Formula I:

[chemical structure]

[0393] wherein

[0394] R₁, R₂, R₄ and R₈ are independently selected from the group consisting of H, C₁-C₁₈ alkyl, C₂-C₁₈ alkenyl, (C₁-C₁₈ alkyl)OH, (C₁-C₁₈ alkyl)SH, (C₂-C₃ alkyl)SCH₃, (C₁-C₄ alkyl)CONH₂, (C₁-C₄ alkyl)COOH, (C₁-C₄ alkyl)NH₂, (C₁-C₄ alkyl)NHC(NH₂⁺)NH₂, (C₀-C₄ alkyl)(C₃-C₆ cycloalkyl), (C₀-C₄ alkyl)(C₂-C₅ heterocyclic), (C₀-C₄ alkyl)(C₆-C₁₀ aryl)R₇, (C₁-C₄ alkyl)(C₃-C₉ heteroaryl), and C₁-C₁₂ alkyl(W₁)C₁-C₁₂ alkyl, wherein W₁ is a heteroatom selected from the group consisting of N, S and O, or R₁ and R₂ together with the atoms to which they are attached form a C₃-C₁₂ cycloalkyl or aryl; or R₄ and R₈ together with the atoms to which they are attached form a C₃-C₆ cycloalkyl;

[0395] R₃ is selected from the group consisting of C₁-C₁₈ alkyl, (C₁-C₁₈ alkyl)OH, (C₁-C₁₈ alkyl)NH₂, (C₁-C₁₈ alkyl)SH, (C₀-C₄ alkyl)(C₃-C₆)cycloalkyl, (C₀-C₄ alkyl)(C₂-C₅ heterocyclic), (C₀-C₄ alkyl)(C₆-C₁₀ aryl)R₇, and (C₁-C₄ alkyl)(C₃-C₉ heteroaryl) or R₄ and R₃ together with the atoms to which they are attached form a 4, 5 or 6 member heterocyclic ring;

[0396] R₅ is NHR₆ or OH;

[0397] R₆ is H, C₁-C₈ alkyl or R₆ and R₂ together with the atoms to which they are attached form a 4, 5 or 6 member heterocyclic ring; and

[0398] R₇ is selected from the group consisting of H and OH.

[0399] In another embodiment the dipeptide element linked to the glucagon/T3 conjugate comprises a compound having the general structure of Formula I:

[chemical structure]

[0400] wherein

[0401] R₁, R₂, R₄ and R₈ are independently selected from the group consisting of H, C₁-C₁₈ alkyl, C₂-C₁₈ alkenyl, (C₁-C₁₈ alkyl)OH, (C₁-C₁₈ alkyl)SH, (C₂-C₃ alkyl)SCH₃, (C₁-C₄ alkyl)CONH₂, (C₁-C₄ alkyl)COOH, (C₁-C₄ alkyl)NH₂, (C₁-C₄ alkyl)NHC(NH₂⁺)NH₂, (C₀-C₄ alkyl)(C₃-C₆ cycloalkyl), (C₀-C₄ alkyl)(C₂-C₅ heterocyclic), (C₀-C₄ alkyl)(C₆-C₁₀ aryl)R₇, (C₁-C₄ alkyl)(C₃-C₉ heteroaryl), and C₁-C₁₂ alkyl(W₁)C₁-C₁₂ alkyl, wherein W₁ is a heteroatom selected from the group consisting of N, S and O, or R₁ and R₂ together with the atoms to which they are attached form a C₃-C₁₂ cycloalkyl; or R₄ and R₈ together with the atoms to which they are attached form a C₃-C₆ cycloalkyl;

[0402] R₃ is selected from the group consisting of C₁-C₁₈ alkyl, (C₁-C₁₈ alkyl)OH, (C₁-C₁₈ alkyl)NH₂, (C₁-C₁₈ alkyl)SH, (C₀-C₄ alkyl)(C₃-C₆)cycloalkyl, (C₀-C₄ alkyl)(C₂-C₅ heterocyclic), (C₀-C₄ alkyl)(C₆-C₁₀ aryl)R₇, and (C₁-C₄ alkyl)(C₃-C₉ heteroaryl) or R₄ and R₃ together with the atoms to which they are attached form a 4, 5 or 6 member heterocyclic ring;

[0403] R₅ is NHR₆ or OH;

[0404] R₆ is H, C₁-C₈ alkyl or R₆ and R₁ together with the atoms to which they are attached form a 4, 5 or 6 member heterocyclic ring; and

[0405] R₇ is selected from the group consisting of hydrogen, C₁-C₁₈ alkyl, C₂-C₁₈ alkenyl, (C₀-C₄ alkyl)CONH₂, (C₀-C₄ alkyl)COOH, (C₀-C₄ alkyl)NH₂, (C₀-C₄ alkyl)OH, and halo.

[0406] In one embodiment a complex is provided comprising the general structure A-B-(Q-L-Y), wherein Q-L-Y comprises any of the structures as described elsewhere in this disclosure and A-B is a dipeptide that is linked via an amide bond to an amine of the Q-L-Y conjugate. In one embodiment A-B is linked to amine present on L. In one embodiment A-B is linked to amine present on Q. In one embodiment A-B is linked to amine present on Y.

[0407] In one embodiment, a complex of the structure A-B-(Q-L-Y) is provided, wherein Q-L-Y comprises any of the structures as described elsewhere in this disclosure and wherein

[0408] A is an amino acid or a hydroxy acid;

[0409] B is an N-alkylated amino acid linked to Q or Y through an amide bond between a carboxyl moiety of B and an amine of Q or Y; and

A-B comprises the structure:

[chemical structure]

wherein
(a) R¹, R², R⁴ and R⁸ are independently selected from the group consisting of H, C1-C18 alkyl, C2-C18 alkenyl, (C1-C18 alkyl)OH, (C1-C18 alkyl)SH, (C2-C3 alkyl)SCH₃, (C1-C4 alkyl)CONH₂, (C1-C4 alkyl)COOH, (C1-C4 alkyl)NH₂, (C1-C4 alkyl)NHC(NH₂⁺)NH₂, (C0-C4 alkyl)(C3-C6 cycloalkyl), (C0-C4 alkyl)(C2-C5 heterocyclic), (C0-C4 alkyl)(C6-C10 aryl)R⁷, (C1-C4 alkyl)(C3-C9 heteroaryl), and C1-C12 alkyl(W1)C1-C12 alkyl, wherein W1 is a heteroatom selected from the group consisting of N, S and O, or
(ii) R¹ and R² together with the atoms to which they are attached form a C3-C12 cycloalkyl or aryl; or
(iii) R⁴ and R⁸ together with the atoms to which they are attached form a C3-C6 cycloalkyl;
(b) R³ is selected from the group consisting of C1-C18 alkyl, (C1-C18 alkyl)OH, (C1-C18 alkyl)NH₂, (C1-C18 alkyl)SH, (C0-C4 alkyl)(C3-C6)cycloalkyl, (C0-C4 alkyl)(C2-C5 heterocyclic), (C0-C4 alkyl)(C6-C10 aryl)R⁷, and (C1-C4 alkyl)(C3-C9 heteroaryl) or R⁴ and R³ together with the atoms to which they are attached form a 4, 5 or 6 member heterocyclic ring;
(c) R⁵ is NHR⁶ or OH;
(d) R⁶ is H, C₁-C₈ alkyl; and
(e) R⁷ is selected from the group consisting of H and OH
wherein the chemical cleavage half-life (t_{1/2}) of A-B from Q or Y is at least about 1 hour to about 1 week in PBS under physiological conditions.

[0410] In a further embodiment, A-B comprises the structure:

[chemical structure]

[0411] wherein

[0412] R₁ and R₈ are independently H or C₁-C₈ alkyl;

[0413] R₂ and R₄ are independently selected from the group consisting of H, C₁-C₈ alkyl, (C₁-C₄ alkyl)OH, (C₁-C₄ alkyl)SH, (C₂-C₃ alkyl)SCH₃, (C₁-C₄ alkyl)CONH₂, (C₁-C₄ alkyl)COOH, (C₁-C₄ alkyl)NH₂, and (C₁-C₄ alkyl)(C₆ aryl)R₇;

[0414] R₃ is C₁-C₆ alkyl;

[0415] R₅ is NH₂; and

R₇ is selected from the group consisting of hydrogen, and OH.
In a further embodiment, A-B comprises the structure:

[chemical structure]

wherein

[0416] R₁ is H;

[0417] R₂ is H, C₁-C₄ alkyl, (CH₂ alkyl)OH, (C₁-C₄ alkyl)NH₂, or (CH₂)(C₆ aryl)R₇;

[0418] R₃ is C₁-C₆ alkyl;

[0419] R₄ is H, C₁-C₄ alkyl, or (CH₂)(C₆ aryl)R₇;

[0420] R₅ is NH₂;

[0421] R₈ is hydrogen; and

[0422] R₇ is H or OH.

In a further embodiment, A-B comprises the structure:

[chemical structure]

wherein

[0423] R₁ is H;

[0424] R₂ is (C₁-C₄ alkyl)NH₂;

[0425] R₃ is C₁-C₆ alkyl;

[0426] R₄ is H, C₁-C₄ alkyl, or (CH₂)(C₆ aryl)R₇;

[0427] R₅ is NH₂; and

[0428] R₈ is hydrogen.

### EXEMPLARY EMBODIMENTS

[0429] In accordance with embodiment 1 a conjugate comprising the structure Q-L-Y is provided;

wherein

[0430] Q is a glucagon agonist peptide;

[0431] Y is a thyroid receptor ligand; and

[0432] L is a linking group or a bond joining Q to Y.

[0433] In accordance with embodiment 2, the conjugate of claim 1 is provided, wherein Y is a compound having the general structure

[chemical structure]

wherein

[0434] R₁₅ is C₁-C₄ alkyl, —CH₂(pyridazinone), —CH₂(OH)(phenyl)F, —CH(OH)CH₃, halo or H;

[0435] R₂₀ is halo, CH₃ or H;

[0436] R₂₁ is halo, CH₃ or H;

[0437] R₂₂ is H, OH, halo, —CH₂(OH)(C₆ aryl)F, and C₁-C₄ alkyl; and

[0438] R₂₃ is —CH₂CH(NH₂)COOH, —OCH₂COOH, —NHC(O)COOH, —CH₂COOH,

[0439] —NHC(O)CH₂COOH, —CH₂CH₂COOH, or —OCH₂PO₃²⁻.

[0440] In accordance with embodiment 3, the conjugate of any one of claims 1 to 2 is provided wherein

[0441] wherein

[0442] R₁₅ is C₁-C₄ alkyl, —CH(OH)CH₃, I or H

[0443] R₂₀ is I, Br, CH₃ or H;

[0444] R₂₁ is I, Br, CH₃ or H;

[0445] R₂₂ is H, OH, I, or C₁-C₄ alkyl; and

[0446] R₂₃ is —CH₂CH(NH₂)COOH, —OCH₂COOH, —NHC(O)COOH, —CH₂COOH,

[0447] —NHC(O)CH₂COOH, —CH₂CH₂COOH, or —OCH₂PO₃²⁻.

[0448] In accordance with embodiment 4, the conjugate of any one of claims 1 to 3 is provided wherein

[0449] R₁₅ is C₁-C₄ alkyl, I or H;

[0450] R₂₀ is I, Br, CH₃ or H;

[0451] R₂₁ is I, Br, CH₃ or H;

[0452] R₂₂ is H, OH, I, or C₁-C₄ alkyl; and

[0453] R₂₃ is —CH₂CH(NH₂)COOH, —OCH₂COOH, —NHC(O)COOH, —CH₂COOH,

[0454] —NHC(O)CH₂COOH, —CH₂CH₂COOH, and —OCH₂PO₃²⁻.

[0455] In accordance with embodiment 5, the conjugate of any one of claims 1 to 4 is provided wherein Y is a compound of the general structure of Formula I:

[chemical structure]

[0456] wherein

[0457] R₂₀, R₂₁, and R₂₂ are independently selected from the group consisting of H, OH, halo and C₁-C₄ alkyl; and

[0458] R₁₅ is halo or H.

[0459] In accordance with embodiment 6, the conjugate of any one of claims 1 to 5 is provided wherein Y is selected from the group consisting of 3,5,3′,5′-tetra-iodothyronine and 3,5,3′-triiodo L-thyronine.

[0460] In accordance with embodiment 7, the conjugate of any one of claims 1 to 6 is provided wherein Y is 3,5,3′-triiodo L-thyronine.

[0461] In accordance with embodiment 8, the conjugate of any one of claims 1 to 6 is provided wherein Y is a compound having the general structure

[chemical structure]

[0462] wherein

[0463] R₁₅ is isopropyl;

[0464] R₂₀ is CH₃;

[0465] R₂₁ is CH₃;

[0466] R₂₂ is H; and

[0467] R₂₃ is —OCH₂PO₃²⁻.

[0468] In accordance with embodiment 9, the conjugate of any one of claims 1 to 8 is provided wherein the conjugate comprises a glucagon agonist peptide of SEQ ID NO: 1 or analog thereof comprising at least one amino acid modification selected from the group consisting of a

[0469] substitution at position 28 with Asn, Asp, or Glu;

[0470] substitution at position 28 with Asp;

[0471] substitution at position 28 with Glu;

[0472] substitution of Thr at position 29 with a charged amino acid;

[0473] substitution of Thr at position 29 with a charged amino acid selected from the group consisting of Lys, Arg, His, Asp, Glu, cysteic acid, and homocysteic acid;

[0474] substitution at position 29 with Asp, Glu, or Lys;

[0475] substitution at position 29 with Glu or Gly;

[0476] insertion of 1-3 charged amino acids after position 29;

[0477] insertion after position 29 of Glu or Lys;

[0478] insertion after position 29 of Gly-Lys or Lys-Lys; and

[0479] Gln at position 3.

[0480] In accordance with embodiment 10, the conjugate of any one of claims 1 to 9 is provided wherein Q is a glucagon analog comprising the sequence

[0481] X₁X₂X₃GTFTSDYSX₁₂YLX₁₅X₁₆RRAQX₂₁FVX₂₄WLX₂₇X₂₈X₂₉ (SEQ ID NO: 920)

[0482] wherein

[0483] X₁ is selected from the group consisting of His, D-His, N-methyl-His, alpha-methyl-His, imidazole acetic acid, des-amino-His, hydroxyl-His, acetyl-His, homo-His, or alpha, alpha-dimethyl imidiazole acetic acid (DMIA);

[0484] X₂ is selected from the group consisting of Ser, D-Ser, Ala, D-Ala, Gly, N-methyl-Ser, Aib, Val, or α-amino-N-butyric acid;

[0485] X₃ is an amino acid comprising a side chain of Structure I, II, or III:

[chemical structure]

[0486] wherein R¹ is C₀₋₃ alkyl or C₀₋₃ heteroalkyl; R² is NHR⁴ or C₁₋₃ alkyl; R³ is C₁₋₃ alkyl; R⁴ is H or C₁₋₃ alkyl; X is NH, 0, or S; and Y is NHR⁴, SR³, or OR³;

[0487] one, two, three, or all of the amino acids at positions 16, 20, 21, and 24 substituted with an α,α-disubstituted amino acid;

[0488] X₁₂ is Lys or Arg;

[0489] X₁₅ is Asp, Glu, cysteic acid, homoglutamic acid or homocysteic acid;

[0490] X₁₆ is Ser, glutamine, homoglutamic acid, homocysteic acid, Thr or Aib;

[0491] X₂₁ is Asp, Lys, Cys, Orn, homocysteine or acetyl phenylalanine;

[0492] X₂₄ is Gln, Lys, Cys, Orn, homocysteine or acetyl phenylalanine;

[0493] X₂₇ is Met, Leu or Nle;

[0494] X₂₈ is Asn, Lys, Arg, His, Asp or Glu; and

[0495] X₂₉ is Thr, Lys, Arg, His, Gly, Asp or Glu.

[0496] In accordance with embodiment 11, the conjugate of claim 10 is provided wherein

[0497] X₃ is Gln; and

[0498] X₁₆ is Aib.

[0499] In accordance with embodiment 12, the conjugate of any one of claims 1 to 11 is provided wherein the glucagon agonist peptide further comprises a C-terminal extension of SEQ ID NO: 26 (GPSSGAPPPSX₄₀), SEQ ID NO: 27 (KRNRNNIAX₄₀) or SEQ ID NO: 28 (KRNRX₄₀) bound to amino acid 29 of the glucagon peptide through a peptide bond, wherein X₄₀ is an amino acid selected from the group consisting of Cys or Lys.

[0500] In accordance with embodiment 13, the conjugate of any one of claims 1 to 12 is provided wherein the amino acid at position 29 is Gly and the glucagon agonist peptide further comprises a C-terminal extension of SEQ ID NO: 926 (GPSSGAPPPSK).

[0501] In accordance with embodiment 14, the conjugate of any one of claims 1 to 13 is provided wherein Q is a peptide comprising the sequence of

HX₂QGTFTSDYSX₁₂YLDSRRAQDFVQWLX₂₇X₂₈GGPSSGAPPPSX₄₀ (SEQ ID NO: 924)

[0502] wherein

[0503] X₂ is selected from the group consisting of D-Ser, or Aib;

[0504] X₁₂ is Lys or Arg;

[0505] X₂₇ is Met, Leu or Nle;

[0506] X₂₈ is Asn, Lys, Arg, His, Asp or Glu; and

[0507] X₄₀ is Lys; and

[0508] Y is a compound of the general structure of Formula I:

[chemical structure]

[0509] R₂₀, R₂₁ and R₂₂ are each halo and R₁₅ is H or halo.

[0510] In accordance with embodiment 15, the conjugate of any one of claims 1 to 14 is provided wherein the thyroid hormone receptor ligand is covalently attached to the side chain amine of a Lys at position 29 or at position 30-40 of a C-terminal extension relative to native glucagon.

[0511] In accordance with embodiment 16, the conjugate of any one of claims 1 to 15 is provided wherein the thyroid hormone receptor ligand is covalently attached to the side chain amine of a Lys at position 30 or 40 of said C-terminal extension.

[0512] In accordance with embodiment 17, the conjugate of any one of claims 1 to 16 is provided wherein the thyroid hormone receptor ligand is covalently attached to the glucagon agonist peptide via an amino acid or dipeptide linker.

[0513] In accordance with embodiment 18, the conjugate of any one of claims 1 to 17 is provided wherein the glucagon agonist peptide comprises the C-terminal extension of GPSSGAPPPSK (SEQ ID NO: 926); and

[0514] the thyroid hormone receptor ligand is 3,5,3′,5′-tetra-iodothyronine, or 3,5,3′-triiodo L-thyronine, wherein the thyroid hormone receptor ligand is covalently linked to the side chain amine of a Lys of the glucagon agonist peptide through a gamma glutamic acid (γGlu) spacer added to the carboxylate of the thyroid hormone receptor.

[0515] In accordance with embodiment 19, the conjugate of any one of claims 1 to 18 is provided wherein the glucagon agonist peptide comprises SEQ ID NO: 1.

[0516] In accordance with embodiment 20, the conjugate of any one of claims 1 to 19 is provided wherein L is stable in vivo, is hydrolyzable in vivo, or is metastable in vivo.

[0517] In accordance with embodiment 23, the conjugate of any one of claims 1 to 22 is provided wherein L comprises an ether moiety or an amide moiety.

[0518] In accordance with embodiment 24, the conjugate of any one of claims 1 to 19 is provided wherein Q comprises the amino acid sequence:

X₁-X₂-Gln-Gly-Thr-Phe-Thr-Ser-Asp-Tyr-Ser-Lys-Tyr-Leu-Asp-Ser-Arg-Arg-Ala-Gln-Asp-Phe-Val-Gln-Trp-Leu-Met-Z (SEQ ID NO: 839) with 1 to 3 amino acid modifications thereto,

[0519] (a) wherein X₁ and/or X₂ is a non-native amino acid (relative to SEQ ID NO: 1601) that reduces susceptibility of the glucagon peptide to cleavage by dipeptidyl peptidase IV (DPP-IV),

[0520] (b) wherein Z is selected from the group consisting of —COOH, -Asn-COOH, Asn-Thr-COOH, and W—COOH, wherein W is selected from the group consisting of GPSSGAPPPS (SEQ ID NO: 823), GGPSSGAPPPS (SEQ ID NO: 928), GPSSGAPPPK (SEQ ID NO: 929), GGPSSGAPPPK (SEQ ID NO: 930), NGGPSSGAPPPS (SEQ ID NO: 931) and NGGPSSGAPPPSK (SEQ ID NO: 932), wherein Q exhibits glucagon agonist activity.

[0521] In accordance with embodiment 25, the conjugate of any one of claims 1 to 24 is provided wherein Q comprises the amino acid sequence of SEQ ID NO: 1 and comprises:

(a) at least one amino acid modification selected from the group consisting of:

[0522] (i) substitution of Thr at position 29 with a charged amino acid;

[0523] (ii) substitution of Thr at position 29 with a charged amino acid selected from the group consisting of Lys, Arg, His, Asp, Glu, cysteic acid, and homocysteic acid;

[0524] (iii) substitution at position 29 with Asp, Glu, or Lys;

[0525] (iv) substitution at position 29 with Glu or Gly;

[0526] (v) insertion after position 29 of 1 to 3 charged amino acids;

[0527] (vi) insertion after position 29 of Glu or Lys;

[0528] (vii) insertion after position 29 of Gly-Lys, or Lys-Lys;

[0529] (viii) substitution of Gln at position 3 with an amino acid comprising a side chain of Structure I, II, or III:

[chemical structure]

[0530] wherein R¹ is C₀₋₃ alkyl or C₀₋₃ heteroalkyl; R² is NHR⁴ or C₁₋₃ alkyl; R³ is C₁₋₃ alkyl; R⁴ is H or C₁₋₃ alkyl; X is NH, 0, or S; and Y is NHR⁴, SR³, or OR³; and

[0531] (ix) a combination thereof; and

(b) substitution of Ser at position 16 with Thr, Glu, or Aib; and at least one amino acid modification selected from the group consisting of:

[0532] (i) substitution of His at position 1 with a non-native amino acid that reduces susceptibility of the glucagon peptide to cleavage by dipeptidyl peptidase IV (DPP-IV),

[0533] (ii) substitution of Ser at position 2 with a non-native amino acid that reduces susceptibility of the glucagon peptide to cleavage by dipeptidyl peptidase IV (DPP-IV),

[0534] (iii) substitution of Thr at position 7 with Ile, Abu, or Val;

[0535] (iv) substitution of Gln at position 20 with Ser, Thr, Ala, Aib, Arg, or Lys;

[0536] (v) substitution of Met at position 27 with Leu or Nle;

[0537] (vi) deletion of amino acids at positions 28-29;

[0538] (vii) deletion of the amino acid at positions 29;

[0539] (viii) addition of the amino acid sequence GPSSGAPPPS to the C-terminus; and

[0540] (ix) addition of the amino acid sequence GPSSGAPPPSX to the C-terminus, wherein X is any amino acid; and

[0541] (x) a combination thereof;

[0542] wherein Q exhibits glucagon agonist activity.

[0543] In accordance with embodiment 26, the conjugate of any one of claims 1 to 25 is provided wherein L-Y is covalently conjugated to the N-terminus, C-terminus, or an amino acid side chain of Q.

[0544] In accordance with embodiment 27, the conjugate of any one of claims 1 to 26 is provided wherein L-Y is covalently conjugated to an amino acid side chain of an amino acid at position 10, 30, 37, 38, 39, 40, 41, 42, or 43 of Q, and L is an amino acid or dipeptide.

[0545] In accordance with embodiment 28, the conjugate of any one of claims 1 to 27 is provided wherein L-Y comprises the structure:

[chemical structure]

[0546] wherein

[0547] L is a bond, an amino acid, or dipeptide joining Q to Y; and

[0548] R₁₅ is H or I.

[0549] In accordance with embodiment 29, the conjugate of claim 28 is provided wherein L is γ-Glu or the dipeptide, γ-Glu-γ-Glu.

[0550] In accordance with embodiment 30, the conjugate of any one of claims 1 to 27 is provided wherein L-Y comprises the structure

[chemical structure]

[0551] In accordance with embodiment 31, the conjugate of any one of claims 1 to 30 is provided wherein Q comprises the sequence

X₁X₂QGTFTSDYSKYLX₁₅X₁₆RRAQDFVQWLX₂₇X₂₈GGPSSGAPPPSX₄₀ (SEQ ID NO: 927)

[0552] wherein

[0553] X₁ is selected from the group consisting of His, D-His, N-methyl-His, alpha-methyl-His, imidazole acetic acid, des-amino-His, hydroxyl-His, acetyl-His, homo-His, or alpha, alpha-dimethyl imidiazole acetic acid (DMIA);

[0554] X₂ is selected from the group consisting of Ser, D-Ser, Ala, D-Ala, Gly, N-methyl-Ser, Aib, Val, or α-amino-N-butyric acid;

[0555] X₁₅ is Asp, Glu, cysteic acid, homoglutamic acid or homocysteic acid;

[0556] X₁₆ is Ser, glutamine, homoglutamic acid, homocysteic acid, Thr or Aib;

[0557] X₂₇ is Met, Leu or Nle;

[0558] X₂₈ is Asn, Lys, Arg, His, Asp or Glu; and

[0559] X₄₀ is an amino acid selected from the group consisting of Cys or Lys.

[0560] In accordance with embodiment 32, the conjugate of any one of claims 1 to 31 is provided wherein L-Y is conjugated to an amino acid side chain of Q at position 40.

[0561] In accordance with embodiment 33, the conjugate of any one of claims 1 to 32 is provided wherein

[0562] X₁ is His;

[0563] X₂ is selected from the group consisting of Ser, D-Ser, Ala, D-Ala, Gly, N-methyl-Ser, Aib, Val, or α-amino-N-butyric acid;

[0564] X₁₅ is Asp, Glu, cysteic acid, homoglutamic acid or homocysteic acid;

[0565] X₁₆ is Ser, glutamine, Thr or Aib;

[0566] X₂₇ is Met, Leu or Nle;

[0567] X₂₈ is Asn;

[0568] X₂₉ is Thr or Gly; and

[0569] X₄₀ is Lys.

[0570] In accordance with embodiment 34, the conjugate of any one of claims 1 to 33 is provided further comprising the structure A-B, wherein

[0571] A is an amino acid or a hydroxy acid;

[0572] B is an N-alkylated amino acid linked to Q or Y through an amide bond between a carboxyl moiety of B and an amine of Q or Y; and

[0573] A-B comprises the structure:

[chemical structure]

wherein

[0574] (a) R¹, R², R⁴ and R⁸ are independently selected from the group consisting of H, C1-C18 alkyl, C2-C18 alkenyl, (C1-C18 alkyl)OH, (C1-C18 alkyl)SH, (C2-C3 alkyl)SCH₃, (C1-C4 alkyl)CONH₂, (C1-C4 alkyl)COOH, (C1-C4 alkyl)NH₂, (C1-C4 alkyl)NHC(NH₂⁺)NH₂, (C0-C4 alkyl)(C3-C6 cycloalkyl), (C0-C4 alkyl)(C2-C5 heterocyclic), (C0-C4 alkyl)(C6-C10 aryl)R⁷, (C1-C4 alkyl)(C3-C9 heteroaryl), and C1-C12 alkyl(W1)C1-C12 alkyl, wherein W1 is a heteroatom selected from the group consisting of N, S and O, or
[0575] (ii) R¹ and R² together with the atoms to which they are attached form a C3-C12 cycloalkyl or aryl; or
[0576] (iii) R⁴ and R⁸ together with the atoms to which they are attached form a C3-C6 cycloalkyl;

[0577] (b) R³ is selected from the group consisting of C1-C18 alkyl, (C1-C18 alkyl)OH, (C1-C18 alkyl)NH₂, (C1-C18 alkyl)SH, (C0-C4 alkyl)(C3-C6)cycloalkyl, (C0-C4 alkyl)(C2-C5 heterocyclic), (C0-C4 alkyl)(C6-C10 aryl)R⁷, and (C1-C4 alkyl)(C3-C9 heteroaryl) or R⁴ and R³ together with the atoms to which they are attached form a 4, 5 or 6 member heterocyclic ring;

[0578] (c) R⁵ is NHR⁶ or OH;

[0579] (d) R⁶ is H, C₁-C₈ alkyl; and

[0580] (e) R⁷ is selected from the group consisting of H and OH

[0581] wherein the chemical cleavage half-life (t_{1/2}) of A-B from Q or Y is at least about 1 hour to about 1 week in PBS under physiological conditions.

[0582] In accordance with embodiment 35, the conjugate of claim 34 is provided wherein
[0583] R₁ and R₈ are independently H or C₁-C₈ alkyl;
[0584] R₂ and R₄ are independently selected from the group consisting of H, C₁-C₈ alkyl, (C₁-C₄ alkyl)OH, (C₁-C₄ alkyl)SH, (C₂-C₃ alkyl)SCH₃, (C₁-C₄ alkyl)CONH₂, (C₁-C₄ alkyl)COOH, (C₁-C₄ alkyl)NH₂, and (C₁-C₄ alkyl)(C₆ aryl)R₇;
[0585] R₃ is C₁-C₆ alkyl;
[0586] R₅ is NH₂; and
[0587] R₇ is selected from the group consisting of hydrogen, and OH.

[0588] In accordance with embodiment 36, the conjugate of any one of claims 1 to 35 wherein
[0589] R₁ is H;
[0590] R₂ is H, C₁-C₄ alkyl, (CH₂ alkyl)OH, (C₁-C₄ alkyl)NH₂, or (CH₂)(C₆ aryl)R₇;
[0591] R₃ is C₁-C₆ alkyl;
[0592] R₄ is H, C₁-C₄ alkyl, or (CH₂)(C₆ aryl)R₇;
[0593] R₈ is hydrogen; and
[0594] R₅ is an amine.

[0595] In accordance with embodiment 37, the conjugate of any one of claims 1 to 36 is provided further comprising an amino acid side chain on Q covalently attached to an acyl group or an alkyl group via an alkyl amine, amide, ether, ester, thioether, or thioester linkage, which acyl group or alkyl group is non-native to a naturally occurring amino acid.

[0596] In accordance with embodiment 38, the conjugate of any one of claims 1 to 37 is provided wherein the amino acid to which the acyl or alkyl group is attached is at position 10, 20, or 24 or at position 30, 37, 38, 39, 40, 41, 32, or 43 of a C-terminal amino acid extension relative to the sequence of native glucagon.

[0597] In accordance with embodiment 39, the conjugate of claim 38 is provided wherein the amino acid to which the acyl or alkyl group is attached is at a position corresponding to position 10 relative to the sequence of native glucagon.

[0598] In accordance with embodiment 40, the conjugate of claim 38 is provided, wherein the acyl group or the alkyl group is attached to the side chain of the amino acid through a spacer and comprises carboxylate at the free end of the alkyl or acyl group.

[0599] In accordance with embodiment 41, the conjugate of any one of claims 1 to 40 is provided wherein the spacer is an acidic amino acid or an acidic dipeptide.

[0600] In accordance with embodiment 42, the conjugate of any one of claims 1 to 41 is provided as a pharmaceutical composition comprising the conjugate of any one of the known glucagon agonist peptides and a pharmaceutically acceptable carrier.

[0601] In accordance with embodiment 43, the conjugate of any one of claims 1 to 42 for use in for treating a disease or medical condition in a patient, wherein the disease or medical condition is selected from the group consisting of hyperlipidemia, metabolic syndrome, diabetes, obesity, liver steatosis, and chronic cardiovascular disease, comprising administering to the patient the pharmaceutical composition of embodiment 40 in an amount effective to treat the disease or medical condition.

### Example 1

### Generation of Glucagon and Thyroid Hormone Conjugates

[0602] Applicants designed a series of unimolecular conjugates of glucagon and thyroid hormone. First, a dipeptidyl peptidase IV (DPP-IV)-resistant, C-terminally extended glucagon analog was created that allows for the site-specific addition of thyroid hormone. Starting with the native glucagon sequence (FIG. 12A), we introduced the D-stereoisomer of serine (dSer) at position 2 to impart DPP-IV resistance. To introduce enough chemical space to facilitate the addition of thyroid hormones to the peptide without negatively impacting activity at the glucagon receptor (GcgR), we added an 11-residue C-terminal extension derived from the GLP-1 paralog exendin-4 along with a terminal lysine (Lys) residue to serve as the anchor point for thyroid hormone conjugation. This 40-mer glucagon analog is used as the “glucagon” component in the conjugates described in this Example, and has a comparable in vitro activity profile at GcgR as native glucagon (FIG. 12B).

[0603] We then constructed three different glucagon/thyroid hormone conjugates. Two of these conjugates include the most bioactive form of thyroid hormone, 3,5,3′-triiodothryonine (T3), in which the orientation of covalent attachment to the peptide is inverted relative to each other. In the first conjugate, herein referred to as “glucagon/T3”, the T3 moiety is covalently attached to the side chain amine of the C-terminal Lys40 through a gamma glutamic acid (γGlu) spacer added to the carboxylate of T3 (FIG. 12C). In the second conjugate, the T3 attachment is inverted relative to the first conjugate (glucagon/T3) and is thus herein referred to as “glucagon/iT3”. In the second conjugate, the amine of T3 is covalently linked to the peptide through a succinate spacer at Lys40 (FIG. 12D). For the third conjugate, 3,3,5′-triiodothryonine was used, otherwise called reverse T3 (rT3), an inactive metabolite of thyroid hormone. The rT3 was coupled to glucagon with the same linker chemistry as used with glucagon/T3 to generate the conjugate referred to as “glucagon/rT3” (FIG. 12E).

[0604] As expected, the three different conjugates have similar activity as the parent peptide at GcgR (FIG. 13E) yet only glucagon/T3 (1 μM) elicited transcriptional activity of a thyroid hormone response element (DR4) in the presence of TR when tested in HepG2 cells (FIG. 13F). These cells endogenously express GcgR and the conjugate uses it to enter the cell at which point the attached T3 can initiate transcription. The transcriptional activity observed with glucagon/T3 is not due to extracellular degradation as the conjugate remains intact with nearly no detectable degradation (as determined based on mass spectral analysis) in the presence of human plasma at 37° C. for up to 24 hours, which is well beyond the assay incubation period.

### Materials and Methods

### Peptide Synthesis.

[0605] Peptide backbones were synthesized by standard fluorenylmethoxycarbonyl (Fmoc)-based solid phase peptide synthesis using 0.1 mmol Rink amide 4-methylbenzhydrylamine (MBHA) resin (Midwest Biotech) on an Applied Biosystems 433A peptide synthesizer. The automated synthesizer utilized 20% piperidine in N-methyl-2-pyrrolidone (NMP) for N-terminal amine deprotection and diisopropylcarbodiimide (DIC)/6-CI-HOBt for amino acid coupling.

### Synthesis of Glucagon/T3 Conjugate.

[0606] A 1:1 molar ratio of 3, 5, 3′-triiodothyronine and di-tert-butyl dicarbonate was dissolved in dioxane/water (4:1, v:v) in the presence of an ice bath with an addition of 0.1 equivalent of triethylamine (TEA). The reaction was stirred for 30 min at 30° C. and then at room temperature for 30 hours, during which the progress of the reaction was monitored by analytical HPLC. Upon completion, the pH of the solution was lowered to 4.0 with 0.1 M hydrochloride (HCl) acid, subsequently treated it repetitively with dichloromethane (DCM) to extract desired product. The organic phase was collected, combined and evaporated in vacuum to afford crude product Boc-T3-OH with good purity.

[0607] The peptide backbone synthesized contained a C-terminal N′-methyltrityl-Llysine (Lys(Mtt)-OH) moiety, whose side chain was orthogonally deprotected by four sequential 10-min treatments with 1% trifluoroacetic acid (TFA), 2% triisopropylsilane (TIS) in DCM to expose an amine as a site for T3 conjugation. The peptidyl-resin was then mixed with a tenfold excess of Fmoc-L-Glu-OtBu(rE) activated by 3-(diethoxyphosphoryloxy)-1,2,3-benzotriazin-4(3H)-one/N,Ndiisopropylethylamine (DEPBT/DIEA) in dimethylformide (DMF) for 2 hours. The completion of the coupling was confirmed by Kaiser test, after which the resin was washed and treated with 20% piperidine in DMF to remove the Fmoc protecting group located at the side chain of the γGlu residue. Subsequently, the peptidyl-resin was reacted with a fivefold excess of crude Boc-T3-OH combined with DEPBT/DIEA in DMF for 2 hours to facilitate T3 conjugation to peptide backbone. Afterwards, the resin were treated with TFA cleavage cocktail containing TFA/anisole/TIS/H2O (85:5:5:5) for 2 hours at room temperature to release conjugate from solid support. Cleaved and fully deprotected conjugate was precipitated and washed with chilled diethyl-ether. The crude conjugates was dissolved in 15% aqueous acetonitrile containing 15% acetic acid and purified by preparative reversed-phase HPLC utilizing a linear gradient of buffer B over buffer A (A: 10% aqueous acetonitrile, 0.1% TFA; B: 100% acetonitrile, 0.1% TFA) on an axia-packed phenomenex luna C18 column (250×21.20 mm) to afford the desired conjugate with carboxyl coupling of T3 to glucagon.

### Synthesis of Glucagon/iT3 Conjugate.

[0608] 3, 5, 3′-triiodothyronine (CHEM-IMPEX INT'L INC.) was solubilized in tert-butyl acetate in the presence of 0.1 equivalent of perchloric acid (HClO₄). The mixture was stirred at 0° C. for 2 hours and at room temperature for 14 hours. Upon completion, the mixture was washed with water and ethyl acetate, treated with 10M sodium hydroxide (NaOH) until pH of the solution reached 9. Subsequently, the mixture was extracted with DCM. The combined organic phase was dried by magnesium sulfate (MgSO₄) and evaporated in vacuum to obtain the desired product NH₂-T3-OtBu. NH₂-T3-OtBu and succinic anhydride were mixed in anhydrous DMF with 0.1 equivalent of DIEA. The reaction was stirred at room temperature for 48 hours. The OH-Suc-T3-OtBu product was obtained followed the same workup as described for NH2-T3-OtBu. Crude OH-Suc-T3-OtBu was dissolved in 15% aqueous acetonitrile containing 15% acetic acid and purified by semi-preparative reversed-phase HPLC using a linear gradient of buffer B over buffer A on an axia-packed phenomenex Luna C18 column (250×21.20 mm). Equimolar equivalents of HO-Suc-T3-OtBu, DEPBT and DIEA were solubilized in DMF and directly added to the peptidyl-resin. The reaction was gently agitated at room temperature for two hours and was monitored by Kaiser test. The peptidyl resins were treated with TFA cleavage cocktail containing TFA/anisole/tTIS/H2O (85:5:5:5) for 2 hours at room temperature to cleave conjugate from solid support. Cleaved conjugate was precipitated and washed with chilled diethyl-ether. The glucagon/iT3 was dissolved and purified by reversed-phase HPLC using the condition described above.

### Synthesis of Glucagon/rT3 Conjugate

[0609] A 1:1 molar ratio of 3, 3′, 5′-triiodothyronine and di-tert-butyl dicarbonate were dissolved in dioxane/water (4:1, v:v) in the presence of an ice bath with an addition of 0.1 equivalent of TEA. The reaction was stirred for 30 mins at 0° C. and at room temperature for another 30 hours. Upon completion, the pH of the solution was lowered to 4.0 with 0.1 M HCl, subsequently treated it repetitively with DCM to extract desired product. The organic phase was collected, combined and evaporated in vacuum to afford crude product Boc-rT3-OH with good purity. The peptide backbone synthesized contained a C-terminal N′-methyltrityl-Llysine (Lys(Mtt)-OH) moiety, whose side chain was orthogonally deprotected by four 10-min treatments with 1% TFA, 2% TIS in DCM to expose amine. The peptidylresin was then mixed with a tenfold excess of Fmoc-L-Glu-OtBu (γGlu) activated by DEPBT/DIEA in DMF for 2 hours. The completion of the coupling was confirmed by Kaiser test, after which the resin was washed and treated with 20% piperidine in DMF to remove the Fmoc protecting group on the γGlu residue. Subsequently, the peptidyl-resin was reacted with a fivefold excess of crude Boc-rT3-OH combined with DEPBT/DIEA in DMF for 2 hours to facilitate rT3 conjugation to peptide backbone.

[0610] Afterwards, the resin were treated with TFA cleavage cocktail containing TFA/anisole/TIS/H2O (85:5:5:5) for 2 hours at room temperature to release conjugate from solid support. Cleaved and fully deprotected conjugate was precipitated and washed with chilled diethyl-ether. The glucagon/rT3 conjugate was dissolved and purified by reversed-phase HPLC using the same condition described above. We confirmed the molecular weights of peptide and conjugates by electrospray ionization (ESI) mass spectrometry and confirmed their character by analytical reversed-phase (HPLC in 0.1% TFA with an ACN gradient on a Zorbax C8 column (0.46 cm×5 cm).

### Human Glucagon Receptor Activation.

[0611] Each peptide or conjugate was individually tested for its ability to activate the human GcgR through a cell-based luciferase reporter gene assay that indirectly measures cAMP induction. Human embryonic kidney (HEK293) cells were co-transfected with GcgR cDNA (zeocin-selection) and a luciferase reporter gene construct fused to a cAMP response element (CRE) (hygromycin B-selection). Cells were seeded at a density of 22,000 cells per well and serum deprived for 16 h in DMEM (HyClone) supplemented with 0.25% (vol/vol) bovine growth serum (BGS) (HyClone). Serial dilutions of the peptides were added to 96-well cell-culture treated plates (BD Biosciences) containing the serum-deprived, co-transfected HEK293 cells, and incubated for 5 h at 37° C. and 5% CO2 in a humidified environment. To stop the incubation, an equivalent volume of Steady Lite HTS luminescence substrate reagent (Perkin Elmer) was added to the cells to induce lysis and expose the lysates to luciferin. The cells were agitated for 5 min and stored for 10 min in the dark.

[0612] Luminescence was measured on a MicroB eta-1450 liquid scintillation counter (Perkin-Elmer). Luminescence data was graphed against concentration of peptide and EC50 values were calculated using Origin software (OriginLab).

### TR Transcriptional Activity.

[0613] For testing of transcriptional activity HEPG2 cells were cultured in HAMF12/DEMEM medium (Biochrom), supplemented with 10 FBS. Cells were seeded at a density of 5×104 cells/well in a 96 well plate. One day after seeding cells were transfect each with 0.45 ng of DR4-luciferase and TRalpha plasmids using Mefatektene (Biontex). Two days after transfection cells were stimulated with 1 μM of each compound for 10 hours. Reaction was stopped and luciferase activity was measured according to the manufactures protocol (Promega).

### Plasma Stability.

[0614] Each compound was incubated with phosphate buffered saline (PBS, pH=7.4) containing 60% mouse plasma at 37° C. for the duration of the study. At the time points of 6 h, 24 h and 72 h, aliquots of the incubated solutions were withdrawn and diluted with acetonitrile to precipitate the plasma proteins, which were subsequently removed by microcentrifugation at 13,000 rpm for 5 mins. The supernatant was collected and diluted for the analytical reversed-phase HPLC using a linear gradient of buffer B over buffer A (A: 10% aqueous acetonitrile, 0.1% TFA; B: 90% aqueous acetonitrile, 0.1% TFA) on a Zorbax C8 column (4.6×50 mm). RNA-Seq Total RNAs were extracted from frozen liver samples of 4 independent mice per group (vehicle, glucagon only, T3 only, co-administration of glucagon and T3 and glucagon/T3) using TriPure RNA reagent (Sigma). Poly-A isolation, library generation and amplification were performed according to the protocol of the mRNASeq Library Prep Kit (Lexogen). The cDNA libraries were then converted to 5500 W librairies using the 5500 W Conversion Primer Kit (Lexogen). The Barcoded cDNA libraries were sequenced on a SOLiD 5500×1 Wildfire sequencer (Life technology). Mapping of color-coded reads on the mouse genome (mm10 assembly) was performed using the Lifescope software (Life Technologies). Reads for annotated (Ensembl) genes were counted using HtSeq. Normalization of expression levels for each gene and differential expression analysis were performed using DES eq276 (Bioconductor R package, false discovery rate <5%). The synergy score (SS) was calculated as the relative fold change (FC) of (glucagon/T3) compared to the maximum FC of T3 and glucagon alone: SS=FC (glucagon/T3)/max (T3, glucagon). Synergistic hits were selected by a SS >1.5. To reduce noise we removed transcripts from the hit list witch do not show significant regulation p<0.05 (BH corrected) when treated with (glucagon/T3) or opposite regulation.

### Pathway Enrichment.

[0615] Enriched KEGG pathways were determined using the hypergeometric distribution test using MATLAB (R2015b). Significant gene regulation was determined using DESeq2. Regulated genes used for pathway enrichment were selected using a threshold of p<0.01 and the false detection rate corrected using Benjamini & Hochberg (BH) procedure. Among significant enriched KEGG pathways, relevant pathways were manually selected.

### Wild-Type Mice for Pharmacology Studies.

[0616] For studies on lipid handling in wildtype mice (Western mice), male C57Bl/6j mice (Jackson Laboratories) were fed a atherogenic Western diet (Research Diets D12079B), which is a high-cholesterol diet (0.21% gm %) with 41% kcal from fat, 43% kcal from carbohydrates, and 17% kcal from protein. For studies on energy metabolism in obese mice (DIO mice), male C57Bl/6j mice (Jackson Laboratories) were fed a diabetogenic diet (Research Diets D12331), which is a high-sucrose diet with 58% kcal from fat 25.5% kcal from carbohydrates, and 16.4% kcal from protein. Both dietary challenges began at 8 weeks of age. HFHSD and HFHCD mice were single- or group-housed on a 12:12-h light-dark cycle at 22° C. with free access to food and water. Mice were maintained under these conditions for a minimum of 16 weeks before initiation of pharmacological studies and were between the ages of 6 months to 12 months old. All injections and tests were performed during the light cycle. Compounds were administered in a vehicle of 1% Tween-80 and 1% DMSO and were given by daily subcutaneous injections at the indicated doses at a volume of 5 μl per g body weight. Mice were randomized and evenly distributed to test groups according to body weight and body composition. If ex vivo molecular biology/histology/biochemistry analyses were performed, the entire group of mice for each treatment was analyzed and scored in a blinded fashion.

### Genetically-Modified Mouse Lines.

[0617] Liver-specific Thrb−/− mice were generated by crossing Thrbflox/flox mice with Alfp-Cre mice. Thrbflox/flox; Cre negative littermates were used as wild-type controls. Mice were maintained on the HFHCD for 8 weeks prior to initiation of treatment. A follow-up study was conducted 4 weeks after the start of the first arm to confirm the effects. The data presented is a compilation of the two independent studies. Inducible, global Gcgr−/− mice were generated by crossing Gcgrflox/flox mice with Rosa26-Cre-ERT2 (tamoxifen-inducible) mice. Design and construction of the Gcgr targeting vector and the subsequent steps to generate mice heterozygous of Gcgrflox/+ were performed by the Gene Targeted Mouse Service Core at the University of Cincinnati. Briefly, the vector was designed to “flox” exons 4-10 of the Gcgr gene, with the neomycin resistant gene and one loxP site being inserted in the intron upstream of exon 4 and the other loxP site in the intron downstream of exon 10. The “floxed” region and the two homologous arms, 3.4 kb and 2.5 kb respectively, were PCR-amplified from mouse genomic DNA and cloned into the vector. The construct was sequenced and then electroporated into mouse ES cells derived from a C57B16 strain, and the resulting cells were subject to drug selection on media containing G418. Drug resistant clones were initially screened by PCR and further confirmed by Southern blot analysis. Correctly targeted ES cell clones were injected into albino blastocysts to generate chimeras, which were then bred with C57B16 female mice to obtain ES cell-derived offspring as determined by the presence of black coat color.

[0618] Black mice were further analyzed by PCR for transmission of targeted Gcgr gene. The neomycin cassette was deleted by breeding with mice carrying “Flip” recombinase.

[0619] Gcgrflox/+ mice lacking the neomycin cassette and Flip allele were selected by subsequent breeding to wild-type C57B16 mice. The mice were backcrossed to C57B16 background for 5 generations and the crossed with Rosa26-Cre-ERT2 mice (Gt(ROSA)26Sortm1(cre/ERT2)Tyj), obtained from The Jackson Laboratory (Stock number #008463).

[0620] Gcgrflox/flox; Rosa26-Cre-ERT2 mice were maintained on the HFHSD for 12 weeks prior to induction of knockdown via twice daily interaperitoneal injections with tamoxifen (1 mg in 100 μl) for 5 consecutive days. Mice that received oil injections were used as wild-type controls. Treatment with compounds were initiated after 2 weeks of washout and recovery following the last tamoxifen injection.

[0621] Global Ldlr−/− mice and wild-type littermates were purchased from Jackson laboratories and were maintained on the HFHCD for 12 weeks prior to treatment initation. Global Ucp1−/− mice and wild-type littermates were bred in house, housed at 30° C., and maintained on a HFHSD for 12 weeks prior to initiations of treatment. All mice were single- or group-housed on a 12:12-h light-dark cycle with free access to food and water.

### Rodent Pharmacological and Metabolism Studies.

[0622] Compounds were administered by repeated subcutaneous injections in the middle of the light phase at the indicated doses with the indicated durations. Co-administration of compounds was administered by single formulated injections. Body weights and food intake were measured every day or every other day after the first injection. All studies with wild-type mice were performed with a group size of n=8 or greater using mice on a C57B16j background.

[0623] For assessment of glucose, pyruvate, and insulin tolerance during chronic treatment, the challenge tests were performed at least 24 hours after the last administration of compounds. The investigators were not blinded to group allocation during the in vivo experiments or to the assessment of longitudinal endpoints. All rodent studies were approved by and performed according to the guidelines of the Institutional Animal Care and Use Committee of the Helmholtz Center Munich, University of Cincinnati, Universite de Lyon, and in accordance with guidelines of the Association for the Assessment and Accreditation of Laboratory and Animal Care (AAALAC # Unit Number: 001057) and appropriate federal, state and local guidelines, respectively.

### Body Composition Measurements.

[0624] Whole-body composition (fat and lean mass) was measured using nuclear magnetic resonance technology (EchoMRI).

### Indirect Calorimetry.

[0625] Energy intake, energy expenditure, respiratory exchange ratio, and home-cage activity were assessed using a combined indirect calorimetry system (TSE Systems). O₂ consumption and CO₂ production were measured every 10 min for a total of up to 120 h (after 24 h of adaptation) to determine the respiratory quotient and energy expenditure after an initial treatment regimen. Food intake was determined continuously for the same time as the indirect calorimetry assessments by integration of scales into the sealed cage environment. Home-cage locomotor activity was determined using a multidimensional infrared light beam system with beams scanning the bottom and top levels of the cage, and activity being expressed as beam breaks.

### Blood Parameters.

[0626] Blood was collected at the indicated times from tail veins or after euthanasia using EDTA-coated microvette tubes (Sarstedt), immediately chilled on ice, centrifuged at 5,000 g and 4° C., and plasma was stored at −80° C. For fast liquid performance chromatography (FPLC) of cholesterol distribution in different lipoprotein fractions, fresh plasma from each treatment group was pooled (n=6-8) and ran over two Superose 6 HR columns in tandem. Cholesterol levels in the collected fractions were determined by colorimetric assay. Plasma insulin and T3 were quantified by an ELISA assay (Ultrasenstive Mouse Insulin ELISA and Rodent T3 ELISA; Alpco). Plasma FGF21 was quantified by an ELISA assay (Mouse FGF21 ELISA; Millipore). Plasma cholesterol, extracted hepatic cholesterol, triglycerides, ALT, and AST were measured using enzymatic assay kits (Thermo Fisher). Plasma creatinine and blood urea nitrogen were measured using enzymatic assay kits (Abcam). Plasma free fatty acids were measured using enzymatic assay kits (Wako). All assays were performed according to the manufacturers' instructions.

### Histopathology.

[0627] After chronic treatment, HFHCD-fed or HFHSD-fed C57B16/j male mice (age) were sacrificed with CO2, body weight as well as heart weights and tibia length was taken during necropsy. Livers and whole hearts were embedded in paraffin using a vacuum infiltration processor TissueTEK VIP (Sakura). 3 μm thick slides were cut using a HMS35 rotatory microtome (Zeiss) and H & E staining was performed. For H & E staining, rehydration was done in a decreasing ethanol series, rinsing with tapwater, 2 min Mayers acid Hemalum, bluing in tapwater followed by lmin EosinY (both BioOptica). Dehydration was performed in increasing ethanol series, mounting with Pertex® (Medite GmbH) and coverslips (CarlRoth Chemicals). The slides were evaluated independently using a brightfield microscope (Axioplan, Zeiss). Photos were taken using the Hamamatsu-Nanozoomer HT2.0 in 1.25×, 5×. 20× and 40× magnification. The hepatic steatosis score is defined as the unweighted sum of the three individual scores for steatosis, lobular inflammation and ballooning degeneration. Steatosis is graded by the presence of fat vacuoles in liver cells according to the percentage of affected tissue (0: <5%; 1: 5-33%; 2: 33-66%; 3: >66%). Lobular inflammation is scored by overall assessment of inflammatory foci per 200× field (0: no foci; 1: <2 foci; 2: 2-4 foci; 3: >4 foci). The individual score for ballooning degeneration ranges from 0 (none), 1 (few cells) to 2 (many cells). Total scores range from 0 to 8 with scores <2 considered non-steatosis, 3 considered as borderline steatosis, 4-5 considered onset of steatosis, and >6 considered steatosis. Different to liver and heart, inguinal fat pad samples were embedded in paraffin using Leica embedding machine (EG1150 H) and cut in 5 μm sections using Leica Microtome (RM2255) to perform H&E staining. Samples were stained with hematoxyline for 4 minutes and eosinY for 2 minutes and fixed with Roti®-Histokitt (Carl Roth) before analysing them independently using Microscope Scope A.1 (Zeiss).

### Echocardiography.

[0628] For transthoracic echocardiography, a Vevo2100 Imaging System (VisualSonics Inc., Toronto Canada) with a 30 MHz probe was used. All echocardiograms were performed on conscious animals to prevent anesthesia-related impairment of cardiac function as reported previously. Briefly, echocardiograms were obtained in parasternal long and short axis views. For accurate linear measurements of LV internal dimensions (LVID) and parasternal (LVPW) or septal (IVS) wall thicknesses, M-mode images of the heart in parasternal short-axis view at the level of the papillary muscle were acquired. Qualitative and quantitative measurements were made offline using analytical software (VisualSonics Inc.). Fractional shortening (FS) was calculated as FS %=[(LVIDd−LVIDs)/LVIDd]×100. Ejection fraction (EF) was calculated as EF %=100*((LVvolD−LVvolS)/LVvolD) with LVvol=((7.0/(2.4+LVID)*LVID³). The corrected LV mass (LV MassCor) was calculated as LV MassCor=0.8(1.053*((LVIDd+LVPWd+IVSd)³−LVIDd³)). Heart rate and respiration rate were determined from M-mode tracings, using 3 consecutive intervals.

### Rectal Body Temperature:

[0629] Rectal body temperature was measured in conscious mice using a high-precision thermometer (thermosensor: Almemo ZA 9040, data logger: Almemo 2290-8, Ahlborn, Holzkirchen, Germany) that was carefully inserted into the rectum. Temperature of each individual was taken by the same researcher one hour after lights-on after chronic treatment ab libitum.

### Atherosclerotic Plaque Assessment.

[0630] The extent of atherosclerotic lesion formation was assessed in aortic root sections of Ldlr−/− mice that were treated with glucagon/T3 or vehicle for 2 weeks by staining for lipid depositions with oil-red O. Briefly, atherosclerotic lesions were measured in 4-μm transverse cryo sections of aortic roots. Images of tissue sections were taken (Leica analysis software LAS) and quantified by manually outlining the lumen boundary. Subsequently, oil red O+ areas were outlined as well and the percentage of oil-red O+ areas in relation to the total area was calculated.

### Immunohistochemistry for UCP1.

[0631] iWAT samples were dissected and subsequently fixed and stored in 4% paraformaldehyde. After dehydration, tissues were embedded in paraffin and cut in 5□m sections to perform immunohistochemistry using rabbit anti-UCP1 antibody (Abcam, ab10983). Therefore, samples were deparaffinized and microwaved in citrate buffer (pH=6) for antigen retrival. To quench endogenous peroxidases samples were incubated with 3% hydrogen peroxide in methanol and then blocked with Avidin D, Biotin (Vectastain ABC Kit; Vector labs) and normal goat serum (10%). Anti-UCP1 antibody (1:400) was added and incubated overnight, before applying secondary anti-rabbit antibody (1:300; Vector Labs ZA0324).

[0632] Vectastain ABC reagent (Vectastain ABC Kit; Vector labs) was used followed by application of SIGMAFAST 3,3′-Diaminobenzidine (Sigma) for signal development, and subsequent counterstaining with hematoxylin and mounting. Finally, sections were analyzed using Microscope Scope A.1 (Zeiss).

[0633] Quantification of accumulated T3 in the liver and iWAT.

[0634] The stock solutions of T3 (Sigma Aldrich) and stable isotope-labeled T3 ([13C6]T3; Cambridge Isotope Laboratories) were prepared dissolving 5 mg of the standard in 100 mL of pure MeOH. T3 calibration standards that ranged in concentration from 0.5 pg/μL to 100 pg/uL were prepared from stock solution through dilution with a solvent mixture of 20% acetonitrile in water. [13C6]T3 was prepared in a mixture of 20% acetonitrile in water at a concentration of 10 pg/μL. The calibration solutions as well as the internal standard solutions, were protected from light, stored at 4° C. and wrapped with aluminum foil.

[0635] Tissue samples were homogenized in methanol containing an antioxidant solution (ascorbic acid, citric acid, and dithiothreitol at 25 g/L in methanol) by ultrasonication (Bandelin Electronics) 2×20 s under cooling with ice. Liquid-liquid extraction was performed as described in 77. Solid phase extraction was performed loaded the water phase into a SampliQ SPE cartridge (60 mg, 3 mL; Agilent Technologies), which were preconditioned sequentially with 3 mL of 50% a methanol in chloroform, 3 mL of pure methanol and 3 mL of water. The target compound as well as the internal standard were eluted with 0.6 mL of 0.1% formic acid in methanol. The solvent was evaporated to dryness under N2 steam and then reconstituted in 0.3 mL of 0.1N HCl in water. The thyroid hormone derivatives were extracted back in organic solvent with 3×0.3 mL of ethyl acetate. The solvent was evaporated again and compounds re-dissolved in 60 μL in a mixture of 20% acetonitrile in water for instrumental analysis.

[0636] Compound separation was carried out on a nanoAcquity UHPLC system (Waters Corporation) interfaced with a quadrupole time-of-flight mass spectrometer Q-TOF2 (Waters-Micromass). The system was operated under MassLynx 4.1 software (Waters-Micromass) in QTOF-MS mode. Samples were infused at a flow rate of 5 μL/min and were monitored in positive ion electrospray mode. High purity nitrogen was used as de-solvation and auxiliary gas; argon was used as the collision gas. The de-solvation gas was set to 200 L/h at a temperature of 120° C., the cone gas was set to 50 L/h and the source temperature at 100° C. The capillary extraction and the cone voltages were set to 2.6 kV and 35 V respectively. The QTOF detector (MPC) was operated at 2100 V. The instrumentation ran in full-scan mode with the QTOF data being collected between m/z 100-1000 with a collision energy of 6 eV. The data were collected in the continuum mode with a scan time 1.5 s, interscan delay of 0.1 s. The processing of calibration and quantification data including peak integration, internal standard correction and linear regression was carried out using the QuanLynx Application Manager (Waters-Micromass).

[0637] A 5 μL volume of tissue sample was directly injected into an HSS-T3 microscale column: 300 μm i. d.×150 mm length, 1.8 μm particle size (Waters Corporation) at a flow rate of 5 μL/min. The mobile phase was 0.1% formic acid in water (mobile phase A) and 0.1% formic acid in acetonitrile (mobile phase B). Gradient elution was performed according to the following elution program: 0-3 min, 95% A, 5% B; 3.5 min 70% A, 30% B; 5.5-6.5 min 62% A, 38% B; 7-10 min, 60% A, 40% B; 12-13 min 100% B, 13.5-20 min 95% A, 5% B. The temperature of the HSS-T3 column was kept at 40° C.

### Gene Expression Analysis.

[0638] Gene expression profiling in the liver, iWAT, eWAT, BAT, and heart were performed following treatment of mice according to the treatment paradigms explained in the figure legends for each specific analsysis. For tissue collection, mice were fasted for 4 h and treated with compounds 2 h prior to tissue collection. Gene expression was profiled with quantitative real-time RT-PCR using either TaqMan single probes or with specifically-designed TaqMan low-density array cards. The relative expression of the selected genes was normalized to the reference gene hypoxanthine-guanine phosphoribosyltransferase (Hprt).

### Results

### Glucagon/T3 Synergistically Improves Hepatic Cholesterol and Lipid Handling

[0639] To determine whether glucagon-mediated delivery of T3 can reverse hypercholesterolemia, hypertriglyceridemia, and hepatic steatosis in metabolically compromised mice, we administered the glucagon/T3 conjugates, along with monoagonist controls, to mice maintained on a high-fat, high-cholesterol diet (HFHCD).

[0640] After treating mice for two weeks with single daily injections at a dose of 100 nmoles/kg, the amount of T3 observed in the liver increased following treatment with glucagon/T3 (FIG. 1A), indicating that the liver is a primary site of action. Glucagon/T3 reduced circulating levels of total cholesterol (FIG. 1B) as well as the fraction of cholesterol bound to both low-density lipoproteins (LDL) and high-density lipoproteins (HDL) (FIG. 1C) to a similar extent as systemic administration of unconjugated T3. Furthermore, glucagon/T3 reduced circulating levels of triglycerides to a similar extent as the unconjugated glucagon analog (FIG. 1D).

[0641] Importantly, at sub-threshold doses for glucagon to lower cholesterol and T3 to lower triglycerides, glucagon/T3 is equally capable of lowering both lipids at an equimolar dose. Glucagon/T3 also lowered hepatic cholesterol content (FIG. 1E) and hepatocellular vacuolation (FIG. 1F) compared to vehicle controls, essentially reversing hepatic steatosis. None of the treatment groups negatively affected liver function, as confirmed by normal plasma levels of alanine aminotransferase (ALT) and aspartate aminotransferase (AST) (FIG. 14A). Renal function was unchanged, as confirmed by normal plasma levels of urea nitrogen (FIG. 14B) and creatinine (FIG. 14C). These beneficial effects of glucagon/T3 on hypercholesterolemia and hypertriglyceridemia were similar to the effects observed after equimolar coadministration of glucagon and T3 (FIG. 15A-B), demonstrating that both glucagon and T3-mediated actions are responsible for the combined effects on lipids of the conjugate. Notably, the cholesterol lowering effect, which is mostly attributable to T3 action, was not evident after treatment with glucagon/iT3 or glucagon/rT3 (FIG. 15A-B). This demonstrates the importance of the specific form of thyroid hormone and its molecular orientation for eliciting the coordinated hormonal actions.

[0642] We analyzed the livers from these treated obese mice for genes involved in cholesterol and lipid metabolism (FIG. 1G). Transcriptional profiling revealed that glucagon/T3 increased the expression of key genes involved in cholesterol metabolism (Srebp2 and Cyp7a1) and cholesterol uptake (Ldlr and Scarb1). Such gene program changes recapitulate the pleotropic molecular signature previously implicated in the cholesterol-lowering effects independently mediated by glucagon and T3.

[0643] Glucagon/T3 also increased gene programs indicative of triglyceride formation (Dgat) and lipolysis (Lipc), indicating that glucagon and thyroid hormone signaling converge in the liver to jointly induce lipid futile cycling. Moreover, glucagon/T3 triggered the expression of fatty acid oxidation-related genes (Ppara and Cpt1a), supporting the reversal of hepatic steatosis induced by the conjugate. Glucagon/T3 increased Fgf21 expression and increased circulating levels of FGF21 (FIG. 1G-H), as both glucagon and T3 are reported to convey certain metabolic actions through FGF21. Cumulatively, these changes in gene programs related to lipid metabolism reflect integrated actions resulting in decreased circulating levels and reduced hepatic deposition of cholesterol and triglycerides, thereby promoting healthy liver function in obesity.

### Glucagon/T3 Improves Lipid Handling in Ldlr−/− Mice

[0644] Murine cholesterol is primarily stored in HDL whereas human cholesterol is stored and transported in both HDL and LDL. To test in a murine model that more closely resembles human physiology, we used low-density lipoprotein receptor knockout mice (Ldlr−/−) to assess the mechanism and translational relevance of the glucagon/T3 conjugate-induced reduction of circulating cholesterol levels.

[0645] Cholesterol lowering of glucagon/T3 was confirmed in Ldlr−/− mice (FIG. 1I). Importantly, the conjugate primarily lowered cholesterol stored in the very low-density lipoprotein (VLDL) and LDL fractions without influencing HDL levels (FIG. 1J). Beyond the translational relevance, this finding indicates that complementary mechanisms independent of LDLR-mediated uptake contribute to the overall efficacy in cholesterol-lowering, which is in agreement with reports on the effects of TRβ-selective agonists to lower cholesterol in Ldlr−/− mice48.

### Glucagon/T3 Ameliorates Atherosclerosis in Ldlr−/− Mice

[0646] Since Ldlr−/− mice display atherosclerotic plaque development and aortic lesions similar to human pathophysiology, and these are not evident in wild-type mice after prolonged exposure to HFHCD, we explored whether glucagon/T3 can reverse atherosclerotic plaque formation in Ldlr−/− mice. In this restorative treatment paradigm in which the mice were maintained on HFHCD for 16 weeks, 2 weeks of treatment with glucagon/T3 reduced atherosclerotic plaque size and lesion coverage at the aortic root compared to vehicle-treated controls (FIG. 1K). Taken together, these results demonstrate that glucagon/T3 improves lipid metabolism to an extent that leads to the regression of established atherosclerosis. These findings serve as the foundation for translational studies aiming to assess the impact of long-term treatment with glucagon/T3 on chronic cardiovascular disease (CVD) caused by dyslipidemia and atherosclerosis.

### Lipid Handling Benefits are Co-Mediated by GcgR and TRI3

[0647] To exclude off-target effects and examine the contribution of each component in glucagon/T3 to the lipid lowering effects, we administered glucagon/T3 to global GcgR knockout mice (GcgR−/− mice) as well as to liver-specific thyroid hormone receptor beta knockout mice (liver-specific Thrb−/−). In GcgR−/− mice, the effects to lower cholesterol (FIG. 2A) and triglycerides (FIG. 2B) were completely lost when compared to wild-type mice. The complete loss of an effect in global GcgR−/− mice confirmed the target specificity of the conjugate, and demonstrated that glucagon activity is essential for sufficient T3 delivery and for coordinating the improved lipid handling. Furthermore, the lack of effects in GcgR−/− mice demonstrates that the T3 moiety is not prematurely separating from the peptide in circulation.

[0648] Similar to the effects in GcgR−/− mice, the effects to lower cholesterol (FIG. 2C) and triglycerides (FIG. 2D) were lost in liver-specific Thrb−/− mice. The absence of such effects in these mice demonstrates the liver selectivity of glucagon/T3, at least as it pertains to cholesterol and triglyceride metabolism. Furthermore, our results demonstrate that TRβ is responsible for mediating the effects on lipid handling and that hepatic TRα is of lesser significance. This aligns with reports that TRβ is the predominant thyroid hormone receptor regulating hepatic lipid handling.

Glucagon-Targeted T3 Adjusts Hepatic Gene Programs More Efficiently than Individual Agonists

[0649] Based on the results of the targeted transcriptomics (FIG. 1G), we performed unbiased transcriptional profiling (mRNA-seq) of livers from mice maintained on HFHCD that were treated with glucagon/T3 for 14 days. Glucagon/T3 regulated the expression of 956 genes with at least a twofold change in expression compared to vehicle (FIG. 3A). Not surprisingly, based on the results in FIG. 1, such mapping identified “steroid hormone biosynthesis” and “metabolic pathways” as two functional patterns enriched in genes that were differentially regulated in the livers of mice treated with glucagon/T3 when compared to vehicle (FIG. 3B). The subcategories of “metabolic pathways” that were enriched included many specific gene programs involved in lipid and carbohydrate metabolism (FIG. 3B). Our analysis of the transcriptomic response also uncovered 359 genes that were regulated by T3 alone and 242 genes that only responded to glucagon (FIG. 3A). Importantly, 577 genes were similarly regulated by glucagon/T3 and the co-administration of equimolar glucagon and T3 (FIG. 3A). This substantial overlap demonstrates that both glucagon-sensitive and T3-sensitive signaling events are being elicited in the liver by the glucagon/T3 conjugate.

[0650] The magnitude of the regulation of those T3-sensitive genes (which are those 359 targets identified above as T3-sensitive) is stronger with the conjugate compared to T3 alone (FIG. 3C & 3D). This suggests that the conjugate is more efficient than equimolar systemic T3 at augmenting the thyroid hormone response in the liver. This enhanced efficiency may be the result of increased accumulation of T3 in the liver arising from glucagon-mediated selective targeting (FIG. 1A), but may also be a consequence of glucagon and T3 synergism to regulate gene expression. Indeed, we observe that the conjugate synergistically regulates gene expression of certain targets (FIG. 3D), meaning that the conjugate elicits similar coordinated gene regulation patterns in a more effective manner when compared with the co-administration of glucagon and T3. To quantify this, we applied a synergy score (see methods) on just those targets that are regulated in the same direction by the conjugate and co-administration. This independent analysis shows that for 208 genes, the magnitude of regulation is conspicuously greater with the conjugate than with glucagon and T3 co-administration, supporting the notion that cumulative targeting may translate to enhanced therapeutic impact. Interestingly, 272 genes were uniquely regulated by glucagon/T3, but did not respond to single or coadministration of glucagon and T3, suggesting that novel signaling cues are being induced by the conjugate.

### Glucagon/T3 Lowers Body Weight by Increasing Energy Expenditure

[0651] Since both glucagon and T3 have been reported to increase energy expenditure and decrease body fat, we explored the weight-lowering capacity of glucagon/T3 in diet-induced obese (DIO) mice maintained on a high-fat, high-sugar diet (HFHSD) compared to mono-agonist controls at equimolar doses. Neither glucagon nor T3 appreciably lowered body weight. However, glucagon/T3 significantly lowered body weight at an equimolar dose with a 10% absolute decrease from baseline after a week of daily treatment (FIG. 4A). Importantly, glucagon/iT3 and glucagon/rT3 failed to lower body weight and did not lower lipids (FIG. 15A-C). The loss of body weight caused by glucagon/T3 was due to a loss of fat mass, not lean mass (FIG. 4B). Food intake was increased by systemic T3 treatment, recapitulating the hyperphagia associated with central hyperthyroidism in rodents, yet was not increased by glucagon/T3 (FIG. 4C). Despite the difference in energy intake, both T3 alone and glucagon/T3 substantially increased whole-body energy expenditure (FIG. 4D). However, the hyperphagia following treatment with T3 compensated for increased energy expenditure, while treatment with glucagon/T3 drove a negative energy balance resulting in a loss of body fat.

[0652] Furthermore, systemic T3 significantly increased home cage activity (FIG. 4E), which paralleled the observed increase in energy expenditure. Unlike mono-therapy with T3 however, the conjugate did not cause an increase in ambulatory activity (FIG. 4E), demonstrating that altered activity is not contributing to the enhanced energy expenditure caused by the conjugate. These data suggest that the glucagon carrier restricts T3 action to select tissues, particularly away from brain circuits governing food intake and locomotion. Consistent with these observations, treatment with T3 but not the conjugate resulted in an increase in circulating levels of T3 (FIG. 4F) and increased rectal temperature after chronic treatment (FIG. 4G). This suggests the enhanced energy expenditure elicited by glucagon/T3 is not causing a hyperthermic response. Additionally, glucagon/T3 caused a decrease in the respiratory exchange ratio (RER) (FIG. 4H) in the absence of change in food intake, indicating that the coordinated action of the two constituents shifted nutrient partitioning to promote fat utilization. Similar to the lack of cholesterol and triglyceride lowering effects observed in GcgR−/− mice, the effects of glucagon/T3 to lower body weight (FIG. 4I), enhance energy expenditure (FIG. 4J), and promote fat utilization (FIG. 4K) are absent in GcgR−/− mice. These findings clearly demonstrate that glucagon is required to unleash the targeted metabolic actions of thyroid hormone. Here, in the absence of the GcgR cellular gateway, the covalent attachment of T3 to glucagon inactivates thyroid hormone pharmacology.

[0653] Glucagon/T3 Induces the Browning of Inguinal White Fat Based on the indirect calorimetry results and because GcgR is abundantly expressed in white adipose tissue (WAT)51, we next tested the effects of glucagon/T3 on WAT and thermogenesis. Although the levels of T3 residing in iWAT are below the limits of detection in a basal state, chronic treatment with glucagon/T3 delivered a detectable amount of T3 in iWAT (FIG. 5A). The conjugate increased the multilocular nature of inguinal WAT (iWAT) and reduced adipocyte size to a similar extent as systemic T3 whereas glucagon alone had negligible effects at this dose (FIG. 5B). Much like T3 itself, glucagon/T3 turned on thermogenic gene programs in iWAT, including, Ucp1, Dio2, and Pgc1a (FIG. 5C), and triggered an increase of UCP-1 immunoreactivity in iWAT (FIG. 5D). In classical brown adipose tissue (BAT), glucagon/T3 had minimal effects on the thermogenic gene profile (FIG. S5), which is consistent with reports of a lack of direct thermogenic effects on BAT by pharmacological glucagon33 and thyromimetics. Collectively, these results demonstrate that the glucagon/T3 conjugate induces browning of iWAT and increases the thermogenic capacity of iWAT.

[0654] To test whether the observed iWAT browning is primary or secondary to fat mass lowering and changes in energy expenditure observed with glucagon/T3, we tested the conjugate in uncoupling protein-1 knockout mice (Ucp1−/−) maintained on a HFHSD. The body weight lowering of glucagon/T3 was blunted, but not completely silenced in Ucp1−/− mice compared to wild-type controls (FIG. 5D). Similar to the effects on body weight, the magnitude of the shift in RER (FIG. 5E) and the increase in energy expenditure (FIG. 5F) induced by glucagon/T3 were diminished in Ucp1−/− mice when compared to wild-type mice. Since these effects were attenuated but not completely lost, we conclude that UCP-1 dependent thermogenesis contributes to the whole-body energy metabolism benefits induced by glucagon/T3, while other mechanisms, such as futile cycling in the liver, contribute additional benefits in response to treatment with glucagon/T3.

### Concurrent T3 Activity Neutralizes the Diabetogenic Action Profile of Glucagon

[0655] Despite the well-recognized body weight benefits of chronic glucagon action, its therapeutic utility for chronically treating obesity is compromised by its well-known promotion of hepatic glucose production. Therefore, we sought to test whether targeted and integrated T3 action could counteract the adverse effects of glucagon to prevent impairment of glycemic control in DIO mice. The addition of the T3 moiety to glucagon dampened acute hyperglycemia (FIG. 6A) and chronically prevented the development of glucose intolerance or hyperglycemia (FIG. 6B), which were evident with glucagon treatment alone.

[0656] In fact, the net result of glucagon/T3 on glucose tolerance is intermediate to the two individual treatments and is substantially improved compared to vehicle-treated controls (FIG. 6B). Furthermore, glucagon/T3 improved insulin sensitivity (FIG. 6C) to a magnitude that is intermediate to glucagon and T3 alone, and lowers plasma levels of insulin (FIG. 6D), which could be the result of hepatic lipid depletion. We used a pyruvate tolerance test as an indirect measure of hepatic glucose output. As expected, the glucagon analog alone worsened pyruvate tolerance whereas T3 alone substantially improved the effect. The attached T3 moiety of the conjugate was capable of completely offsetting the gluconeogenic effects of glucagon due to direct liver targeting (FIG. 6E).

[0657] Furthermore, the attached T3 moiety prevented the glucagon-mediated increase in RER, thus limiting the shift to more carbohydrate utilization that is evident with the glucagon alone (FIG. 6F). This appears to be a direct result of the incorporated T3 action to lessen the surge in hepatic glucose production combined with increased fatty acid utilization induced by the glucagon component, as evident by the acute decrease in circulating free fatty acids induced by glucagon alone and glucagon/T3 (FIG. 6G).

[0658] Both gluconeogenic gene programs (G6pc and Pck1) and glycolytic gene programs (Gck and Pk1r) are increased by glucagon/T3 in the liver (FIG. 6H), supporting that futile glucose cycling is being engaged by coordinated glucagon and thyroid hormone signaling, and may contribute to the carbon turnover measured by indirect calorimetry. The gluconeogenic actions of glucagon are partly governed by engaging the peroxisome proliferator receptor gamma coactivator-1 (PGC-1) axis53, acting to increase PGC-1α levels and repress PGC-1β levels. Herein, we show the concurrent T3 action within the glucagon/T3 conjugate mitigates the glucagon-mediated increase in Pgc1a mRNA levels and simultaneously prevents the glucagon-mediated suppression of Pgc1b mRNA levels (FIG. 6I). Together, these reciprocal changes in PGC-1 isoform expression appear to represent the molecular underpinnings for the dampened gluconeogenic actions and enhanced fatty acid oxidation induced by the coordinated glucagon and T3 actions.

### Glucagon-Mediated T3 Delivery Prevents Cardiovascular Thyrotoxicity

[0659] Although thyroid hormones offer numerous benefits for metabolism, their therapeutic use in obesity or diabetes is undermined by deleterious effects on the cardiovascular system. Although GcgR is expressed in certain cardiovascular tissues, its expression levels are minimal compared to the levels of expression in the liver and fat depots. We assessed the impact of glucagon/T3 on cardiac hypertrophy in DIO mice using echocardiography (Echo) after 4 weeks of treatment (All Echo parameters in Table Si). Equimolar systemic T3 mono-therapy reduced heart rate (FIG. 7A) and increased respiration rate (FIG. 7B), thus indicating a damaging effect on overall respiratory capacity and efficiency. Glucagon/T3 had no effect on either parameter.

[0660] Furthermore, systemic T3 reduced both fraction shortening (FIG. 7C) and ejection fraction (FIG. 7D), demonstrating that untargeted T3 has a detrimental effect on left ventricular function. Once again, the conjugate had no apparent effect on cardiac performance (FIG. 7C-D). Along these lines, systemic T3 but not glucagon/T3 increased the tibia length-corrected heart weight (FIG. 7E) and planar crosssectional area. This demonstrates that the impaired cardiac performance by systemic T3 is the result of substantial cardiac hypertrophy, which appreciably is not evident with glucagon-mediated targeting. Notably, the cardiac hypertrophy observed with T3 alone arises from increases in diastolic (FIG. 7F) and systolic (FIG. 7G) left ventricular wall thickness, a pathological process that does not occur with glucagon/T3 treatment. Systemic T3 directly increased the expression of T3-sensitive genes (Dio2 and Ucp2) (FIG. 7H) and hypertrophic gene markers (Nppa and Nppb) (FIG. 7I) in the whole heart, which importantly did not appear to be regulated by glucagon/T3. This proves that the T3 linked to glucagon, at the dose tested, has limited entry into cardiomyocytes such that the detrimental effects on heart function are not evident.

[0661] Histological profiling of the hearts revealed that T3-treated mice displayed marked features of thyrotoxic cardiomyopathy, including larger cardiomyocytes, increased fat deposition, and infiltration of fibroblast and inflammatory cell into interstitial tissue. In addition, marked cell death was detectable in the hearts of T3-treated mice, including both single cell necrosis as well as larger infarction. Notably, none of these manifestations of thyrotoxicity or thyroid hormone induced cardiomyopathy were detectable following treatment with the glucagon/T3 conjugate at the same molar dose, which is the dose that shows profound and comprehensive improvements in metabolism.

[0662] The data demonstrates that glucagon-mediated targeting spares the cardiovascular system from direct thyroid hormone action. Notably, chronic therapy with glucagon/T3 is not associated with cardiac hypertrophy, altered ventricular function, or cardiomyocyte necrosis, all of which were observed with an equimolar treatment with T3 alone. Conversely, glucagon/T3 causes mobilization and utilization of triglycerides and cholesterol, and prevents the accumulation of atherosclerotic plaques in the aortic root, all of which are vital to reduce CHD risk. Another compelling link to FGF21 action can be made as it protects from cardiac hypertrophy and it is plausible that the observed induction of FGF21 contributes to the cardiac profile after chronic treatment with glucagon/T3. Importantly, the synergistic effects of glucagon and T3 co-agonism translate to less reliance on individual signaling cues to have equal potency as the single hormones. Thus lower circulating concentrations of the conjugate are needed to elicit lipid lowering and body weight-lowering effects, which presumably contribute to the enhanced safety profile.

[0663] The data presented herein demonstrate that combined actions derived from glucagon and thyroid hormone that are incorporated into a single molecule synergize to produce robust effects on lipid and energy metabolism, with an enhanced therapeutic index. Glucagon-mediated targeting offers an alternative to designing isoform-selective thyromimetics, which has proven difficult due to structural similarities in the binding pocket of TR isoforms.

### Example 2

[0664] The ability of each peptide to induce cAMP was measured in a firefly luciferase-based reporter assay. The cAMP production that is induced is directly proportional to the glucagon fragment binding to the glucagon receptor or GIP receptor or GLP-1 receptor. HEK293 cells co-transfected with the receptor and luciferase gene linked to a cAMP responsive element were employed for the bioassay.

[0665] The cells were serum-deprived by culturing 16 hours in Dulbecco-modified Minimum Essential Medium (Invitrogen, Carlsbad, Calif.) supplemented with 0.25% Bovine Growth Serum (HyClone, Logan, Utah) and then incubated with serial dilutions of glucagon fragments for 5 hours at 37° C., 5% CO₂ in 96 well poly-D-Lysine-coated “Biocoat” plates (BD Biosciences, San Jose, Calif.). At the end of the incubation, 100 μL of LucLite luminescence substrate reagent (Perkin Elmer, Wellesley, Mass.) were added to each well. The plate was shaken briefly, incubated 10 min in the dark and light output was measured on MicroBeta-1450 liquid scintillation counter (Perkin-Elmer, Wellesley, Mass.). The effective 50% concentrations (EC₅₀) and inhibitory 50% concentrations (IC₅₀) were calculated by using Origin software (OriginLab, Northampton, Mass.). All EC₅₀s and IC₅₀s are reported in nM, unless indicated otherwise.

1. A conjugate comprising the structure Q-L-Y;
wherein
Q is a glucagon agonist peptide comprising
A) the sequence
X₁X₂X₃GTFTSDYSX₁₂YLX₁₅X₁₆RRAQX₂₁FVX₂₄WLX₂₇X₂₈X₂₉ (SEQ ID NO: 920)
wherein
X₁ is selected from the group consisting of His, D-His, N-methyl-His, alpha-methyl-His, imidazole acetic acid, des-amino-His, hydroxyl-His, acetyl-His, homo-His, or alpha, alpha-dimethyl imidiazole acetic acid (DMIA);
X₂ is selected from the group consisting of Ser, D-Ser, Ala, D-Ala, Gly, N-methyl-Ser, Aib, Val, or α-amino-N-butyric acid;
X₃ is an amino acid comprising a side chain of Structure I, II, or III: [chemical structure]
wherein R¹ is C₀₋₃ alkyl or C₀₋₃ heteroalkyl; R² is NHR⁴ or C₁₋₃ alkyl; R³ is C₁₋₃ alkyl; R⁴ is H or C₁₋₃ alkyl; X is NH, 0, or S; and Y is NHR⁴, SR³, or OR³;
one, two, three, or all of the amino acids at positions 16, 20, 21, and 24 substituted with an α,α-disubstituted amino acid;
X₁₂ is Lys or Arg;
X₁₅ is Asp, Glu, cysteic acid, homoglutamic acid or homocysteic acid;
X₁₆ is Ser, glutamine, homoglutamic acid, homocysteic acid, Thr or Aib;
X₂₁ is Asp, Lys, Cys, Orn, homocysteine or acetyl phenylalanine;
X₂₄ is Gln, Lys, Cys, Orn, homocysteine or acetyl phenylalanine;
X₂₇ is Met, Leu or Nle;
X₂₈ is Asn, Lys, Arg, His, Asp or Glu; and
X₂₉ is Thr, Lys, Arg, His, Gly, Asp or Glu; or
B) the sequence
X₁X₂QGTFTSDYSKYLX₁₅X₁₆RRAQDFVQWLX₂₇X₂₈GGPSSGAPPPSX₄₀ (SEQ ID NO: 927)
wherein
X₁ is selected from the group consisting of His, D-His, N-methyl-His, alpha-methyl-His, imidazole acetic acid, des-amino-His, hydroxyl-His, acetyl-His, homo-His, or alpha, alpha-dimethyl imidiazole acetic acid (DMIA);
X₂ is selected from the group consisting of Ser, D-Ser, Ala, D-Ala, Gly, N-methyl-Ser, Aib, Val, or α-amino-N-butyric acid;
X₁₅ is Asp, Glu, cysteic acid, homoglutamic acid or homocysteic acid;
X₁₆ is Ser, glutamine, homoglutamic acid, homocysteic acid, Thr or Aib;
X₂₇ is Met, Leu or Nle;
X₂₈ is Asn, Lys, Arg, His, Asp or Glu; and
X₄₀ is an amino acid selected from the group consisting of Cys or Lys; or
C) the sequence
HX₂QGTFTSDYSX₁₂YLX₁₅X₁₆RRAQDFVQWLX₂₇X₂₈X₂₉ (SEQ ID NO: 922)
wherein
X₂ is selected from the group consisting of Ser, D-Ser, Ala, D-Ala, Gly, N-methyl-Ser, Aib, Val, or α-amino-N-butyric acid;
X₁₂ is Lys or Arg;
X₁₅ is Asp or Glu;
X₁₆ is Ser, Thr or Aib,
X₂₇ is Met, Leu or Nle;
X₂₈ is Asn, Lys, Arg, His, Asp or Glu; and
X₂₉ is Thr, Lys, Arg, His, Gly, Asp or Glu, wherein the glucagon agonist peptide further comprises a C-terminal extension of SEQ ID NO: 26 (GPSSGAPPPSX₄₀), SEQ ID NO: 27 (KRNRNNIAX₄₀) or SEQ ID NO: 28 (KRNRX₄₀) bound to amino acid 29 of the glucagon peptide through a peptide bond, wherein X₄₀ is an amino acid selected from the group consisting of Cys or Lys;
Y is a thyroid receptor ligand having the general structure of:
I) [chemical structure]
wherein
R₁₅ is C₁-C₄ alkyl, —CH₂(pyridazinone), —CH₂(OH)(phenyl)F, —CH(OH)CH₃, halo or H;
R₂₀ is halo, CH₃ or H—
R₂₁ is halo, CH₃ or H—
R₂₂ is H, OH, halo, —CH₂(OH)(C₆ aryl)F, or C₁-C₄ alkyl; and
R₂₃ is —CH₂CH(NH₂)COOH, —OCH₂COOH, —NHC(O)COOH, —CH₂COOH
—NHC(O)CH₂COOH, —CH₂CH₂COOH, and —OCH₂PO₃²⁻; or
II) [chemical structure]
wherein
R₂₀, R₂₁ and R₂₂ are independently selected from the group consisting of H, OH, halo and C₁-C₄ alkyl; and
R₁₅ is halo or H; or
III) [chemical structure]
wherein
R₁₅ is C₁-C₄ alkyl, I or H;
R₂₀ is I, Br, CH₃ or H—
R₂₁ is I, Br, CH₃ or H—
R₂₂ is H, OH, I, or C₁-C₄ alkyl; and
R₂₃ is —CH₂CH(NH₂)COOH, —OCH₂COOH, —NHC(O)COOH, —CH₂COOH
—NHC(O)CH₂COOH, —CH₂CH₂COOH, and —OCH₂PO₃¹; and
L is a linking group or a bond joining Q to Y.

2-5. (canceled)

6. The conjugate of claim 1 wherein Y is selected from the group consisting of 3,5,3′,5′-tetra-iodothyronine and 3,5,3′-triiodo L-thyronine.

7. The conjugate of claim 1, wherein Y is 3,5,3′-triiodo L-thyronine.

8-9. (canceled)

10. The conjugate of claim 6 wherein Q is a glucagon analog comprising the sequence
X₁X₂X₃GTFTSDYSX₁₂YLX₁₅X₁₆RRAQX₂₁FVX₂₄WLX₂₇X₂₈X₂₉ (SEQ ID NO: 920)
wherein
X₁ is selected from the group consisting of His, D-His, N-methyl-His, alpha-methyl-His, imidazole acetic acid, des-amino-His, hydroxyl-His, acetyl-His, homo-His, or alpha, alpha-dimethyl imidiazole acetic acid (DMIA);
X₂ is selected from the group consisting of Ser, D-Ser, Ala, D-Ala, Gly, N-methyl-Ser, Aib, Val, or α-amino-N-butyric acid;
X₃ is Gln [chemical structure] [chemical structure] [chemical structure]
one, two, three, or all of the amino acids at positions 16, 20, 21, and 24 substituted with an α,α-disubstituted amino acid;
X₁₂ is Lys or Arg;
X₁₅ is Asp, Glu, cysteic acid, homoglutamic acid or homocysteic acid;
X₁₆ is Ser, glutamine, homoglutamic acid, homocysteic acid, Thr or Aib;
X₂₁ is Asp, Lys, Cys, Orn, homocysteine or acetyl phenylalanine;
X₂₄ is Gln, Lys, Cys, Orn, homocysteine or acetyl phenylalanine;
X₂₇ is Met, Leu or Nle;
X₂₈ is Asn, Lys, Arg, His, Asp or Glu; and
X₂₉ is Thr, Lys, Arg, His, Gly, Asp or Glu.

11. (canceled)

12. The conjugate of claim 10 wherein the glucagon agonist peptide further comprises a C-terminal extension of SEQ ID NO: 26 (GPSSGAPPPSX₄₀), SEQ ID NO: 27 (KRNRNNIAX₄₀) or SEQ ID NO: 28 (KRNRX₄₀) bound to amino acid 29 of the glucagon peptide through a peptide bond, wherein X₄₀ is an amino acid selected from the group consisting of Cys or Lys.

13. The conjugate of claim 12 wherein the amino acid at position 29 is Gly and the glucagon agonist peptide further comprises a C-terminal extension of SEQ ID NO: 926 (GPSSGAPPPSK).

14. A conjugate comprising the structure Q-L-Y;
wherein Q is a peptide comprising the sequence of
HX₂QGTFTSDYSX₁₂YLDSRRAQDFVQWLX₂₇X₂₈GGPSSGAPPPSX₄₀ (SEQ ID NO: 924)
wherein
X₂ is selected from the group consisting of D-Ser, or Aib;
X₁₂ is Lys or Arg;
X₂₇ is Met, Leu or Nle;
X₂₈ is Asn, Lys, Arg, His, Asp or Glu; and
X₄₀ is Lys; and
Y is a compound of the general structure of Formula I: [chemical structure]
R₂₀, R₂₁ and R₂₂ are each halo and R₁₅ is H or halo wherein the thyroid hormone receptor ligand is covalently attached to the side chain amine of the Lys at X₄₀ of a Q.

15-16. (canceled)

17. The conjugate of claim 14 wherein the thyroid hormone receptor ligand is covalently attached to the glucagon agonist peptide via an amino acid or dipeptide linker.

18. The conjugate of claim 17 wherein the the thyroid hormone receptor ligand is 3,5,3′,5′-tetra-iodothyronine, or 3,5,3′-triiodo L-thyronine, wherein the thyroid hormone receptor ligand is covalently linked to the side chain amine of a Lys of the glucagon agonist peptide through a gamma glutamic acid (γGlu) spacer added to the carboxylate of the thyroid hormone receptor.

19-23. (canceled)

24. The conjugate of claim 1, wherein Q comprises the amino acid sequence:
X₁-X₂-Gln-Gly-Thr-Phe-Thr-Ser-Asp-Tyr-Ser-Lys-Tyr-Leu-Asp-Ser-Arg-Arg-Ala-Gln-Asp-Phe-Val-Gln-Trp-Leu-Met-Z (SEQ ID NO: 839) with 1 to 3 amino acid modifications thereto,
(a) wherein X₁ is selected from the group consisting of His, D-His, N-methyl-His, alpha-methyl-His, imidazole acetic acid, des-amino-His, hydroxyl-His, acetyl-His, homo-His, and alpha, alpha-dimethyl imidiazole acetic acid (DMIA), and X₂ is selected from the group consisting of Ser, D-Ser, D-Ala, Gly, N-methyl-Ser, Val, and alpha, amino isobutyric acid (Aib), wherein at least one of X₁ and X₂ is a non-native amino acid at that position relative to SEQ ID NO: 1,
(b) wherein Z is selected from the group consisting of —COOH, -Asn-COOH, Asn-Thr-COOH, and W—COOH, wherein W is selected from the group consisting of GPSSGAPPPS (SEQ ID NO: 823), GGPSSGAPPPS (SEQ ID NO: 928), GPSSGAPPPK (SEQ ID NO: 929), GGPSSGAPPPK (SEQ ID NO: 930), NGGPSSGAPPPS (SEQ ID NO: 931) and NGGPSSGAPPPSK (SEQ ID NO: 932),
wherein Q exhibits glucagon agonist activity.

25-26. (canceled)

27. The conjugate of claim 1, wherein L-Y is covalently conjugated to an amino acid side chain of an amino acid at position 10, 30, 37, 38, 39, 40, 41, 42, or 43 of Q, and L is an amino acid or dipeptide.

28. The conjugate of claim 24, wherein L-Y comprises the structure: [chemical structure]
wherein
W is a bond, an amino acid, or dipeptide joining L-Y to Q; and
R₁₅ is H or I.

29. The conjugate of claim 28 wherein W is γ-Glu or the dipeptide, γ-Glu-γ-Glu.

30. The conjugate of claim 1 wherein L-Y comprises the structure [chemical structure]
wherein R₁₅ is H or I.

31. (canceled)

32. The conjugate of claim 10, wherein the glucagon agonist peptide comprises SEQ ID NO: 1 and L-Y is conjugated to an amino acid side chain of Q at position 40.

33. The conjugate of claim 32, wherein
X₁ is His;
X₂ is selected from the group consisting of Ser, D-Ser, Ala, D-Ala, Gly, N-methyl-Ser, Aib, Val, or α-amino-N-butyric acid;
X₁₅ is Asp, Glu, cysteic acid, homoglutamic acid or homocysteic acid;
X₁₆ is Ser, glutamine, Thr or Aib;
X₂₇ is Met, Leu or Nle;
X₂₈ is Asn;
X₂₉ is Thr or Gly; and
X₄₀ is Lys.

34. A derivative of the conjugate of claim 1 further comprising the structure A-B, wherein
A is an amino acid or a hydroxy acid;
B is an N-alkylated amino acid linked to Q or Y through an amide bond between a carboxyl moiety of B and an amine of Q or Y; and
A-B comprises the structure: [chemical structure]
wherein
(a) R¹, R², R⁴ and R⁸ are independently selected from the group consisting of H, C1-C18 alkyl, C2-C18 alkenyl, (C1-C18 alkyl)OH, (C1-C18 alkyl)SH, (C2-C3 alkyl)SCH₃, (C1-C4 alkyl)CONH₂, (C1-C4 alkyl)COOH, (C1-C4 alkyl)NH₂, (C1-C4 alkyl)NHC(NH₂⁺)NH₂, (C0-C4 alkyl)(C3-C6 cycloalkyl), (C0-C4 alkyl)(C2-C5 heterocyclic), (C0-C4 alkyl)(C6-C10 aryl)R⁷, (C1-C4 alkyl)(C3-C9 heteroaryl), and C1-C12 alkyl(W1)C1-C12 alkyl, wherein W1 is a heteroatom selected from the group consisting of N, S and O, or
(ii) R¹ and R² together with the atoms to which they are attached form a C3-C12 cycloalkyl or aryl; or
(iii) R⁴ and R⁸ together with the atoms to which they are attached form a C3-C6 cycloalkyl;
(b) R³ is selected from the group consisting of C1-C18 alkyl, (C1-C18 alkyl)OH, (C1-C18 alkyl)NH₂, (C1-C18 alkyl)SH, (C0-C4 alkyl)(C3-C6)cycloalkyl, (C0-C4 alkyl)(C2-C5 heterocyclic), (C0-C4 alkyl)(C6-C10 aryl)R⁷, and (C1-C4 alkyl)(C3-C9 heteroaryl) or R⁴ and R³ together with the atoms to which they are attached form a 4, 5 or 6 member heterocyclic ring;
(c) R⁵ is NHR⁶ or OH;
(d) R⁶ is H, C₁-C₈ alkyl; and
(e) R⁷ is selected from the group consisting of H and OH
wherein the chemical cleavage half-life (t_{1/2}) of A-B from Q or Y is at least about 1 hour to about 1 week in PBS under physiological conditions.

35-36. (canceled)

37. The conjugate of claim 1, further comprising an amino acid side chain on Q, at a position corresponding to position 10, 20, or 24 of native glucagon, or at position 30, 37, 38, 39, 40, 41, 32, or 43 of a C-terminal extended glucagon analog, or the C-terminal amino acid, covalently attached to an acyl group or an alkyl group via an alkyl amine, amide, ether, ester, thioether, or thioester linkage, which acyl group or alkyl group is non-native to a naturally occurring amino acid.

38-41. (canceled)

42. A pharmaceutical composition comprising the conjugate of claim 1, and a pharmaceutically acceptable carrier.

43. A method for treating a disease or medical condition in a patient, wherein the disease or medical condition is selected from the group consisting of hyperlipidemia, metabolic syndrome, diabetes, obesity, liver steatosis, and chronic cardiovascular disease, comprising administering to the patient the pharmaceutical composition of claim 42 in an amount effective to treat the disease or medical condition.

The application's sequence listing, which the Patent Office published only in electronic form, follows.

SEQUENCE LISTING (935 sequences)

SEQ ID NO: 1 - protein, 29 aa, Homo sapiens
HSQGTFTSDYSKYLDSRRAQDFVQWLMNT

SEQ ID NO: 2 - protein, 29 aa, Artificial Sequence
  Synthetic Glucagon Analogue
  MOD_RES (16)..(16): Glu, Gln, homoglutamic acid or homocysteic acid
  MOD_RES (17)..(17): Arg, Cys, Orn, homocysteine or acetyl phenylalanine
  MOD_RES (27)..(27): Met, Leu or Nle
HSQGTFTSDYSKYLDXXRAQDFVQWLXNT

SEQ ID NO: 3 - protein, 29 aa, Artificial Sequence
  Synthetic Glucagon Analogue
  MOD_RES (16)..(16): Glu, Gln, homoglutamic acid or homocysteic acid
  MOD_RES (21)..(21): Asp, Cys, Orn, homocysteine or acetyl phenyalanine
  MOD_RES (27)..(27): Met, Leu or Nle
HSQGTFTSDYSKYLDXRRAQXFVQWLXNT

SEQ ID NO: 4 - protein, 29 aa, Artificial Sequence
  Synthetic Glucagon Analogue
  MOD_RES (16)..(16): Glu, Gln, homoglutamic acid or homocysteic acid
  MOD_RES (24)..(24): Gln, Cys, Orn, homocysteine or acetyl phenylalanine
  MOD_RES (27)..(27): Met, Leu or Nle
HSQGTFTSDYSKYLDXRRAQDFVXWLXNT

SEQ ID NO: 5 - protein, 29 aa, Artificial Sequence
  Synthetic Glucagon Analogue
  MOD_RES (16)..(16): Glu, Gln, homoglutamic acid or homocysteic acid
  MOD_RES (21)..(21): Asp, Cys, Orn, homocysteine or acetyl phenyalanine
  MOD_RES (24)..(24): Gln, Cys, Orn, homocysteine or acetyl phenyalanine
  MOD_RES (27)..(27): Met, Leu or Nle
HSQGTFTSDYSKYLDXRRAQXFVXWLXNT

SEQ ID NO: 6 - protein, 29 aa, Artificial Sequence
  Synthetic Glucagon Analogue
  MOD_RES (21)..(21): Asp, Cys, Orn, homocysteine or acetyl phenyalanine
  MOD_RES (27)..(27): Met, Leu or Nle
HSQGTFTSDYSKYLDERRAQXFVQWLXNT

SEQ ID NO: 7 - protein, 29 aa, Artificial Sequence
  Synthetic Glucagon Analogue
  MOD_RES (24)..(24): Gln, Cys, Orn, homocysteine or acetyl phenylalanine
  MOD_RES (27)..(27): Met, Leu or Nle
HSQGTFTSDYSKYLDERRAQDFVXWLXNT

SEQ ID NO: 8 - protein, 29 aa, Artificial Sequence
  Synthetic Glucagon Analogue
  MOD_RES (16)..(16): Glu, Gln, homoglutamic acid or homocysteic acid
HSQGTFTSDYSKYLDXRRAQDFVQWLMNT

SEQ ID NO: 9 - protein, 29 aa, Artificial Sequence
  Synthetic Glucagon Analogue
  MOD_RES (27)..(27): Met, Leu or Nle
HSQGTFTSDYSKYLDERRAQDFVQWLXNT

SEQ ID NO: 10 - protein, 29 aa, Artificial Sequence
  Synthetic Glucagon Analogue
HSQGTFTSDYSKYLDERRAQDFVQWLMNT

SEQ ID NO: 11 - protein, 29 aa, Artificial Sequence
  Synthetic Glucagon Analogue
  MISC_FEATURE: c-term amidation
HSQGTFTSDYSKYLDERRAQDFVQWLMNT

SEQ ID NO: 12 - protein, 29 aa, Artificial Sequence
  Synthetic Glucagon Analogue
  MISC_FEATURE (12)..(16): Lactam ring between side chains at position 12 and 16
HSQGTFTSDYSKYLDERRAQDFVQWLMNT

SEQ ID NO: 13 - protein, 29 aa, Artificial Sequence
  Synthetic Glucagon Analogue
  MISC_FEATURE (16)..(20): Lactam ring between side chains at positions 16 and 20
HSQGTFTSDYSKYLDERRAKDFVQWLMNT

SEQ ID NO: 14 - protein, 29 aa, Artificial Sequence
  Synthetic Glucagon Analogue
  MISC_FEATURE (22)..(24): Lactam ring between side chains at positions 22 and 24
HSQGTFTSDYSKYLDSRRAKDFVEWLMNT

SEQ ID NO: 15 - protein, 29 aa, Artificial Sequence
  Synthetic Glucagon Analogue
  MISC_FEATURE (24)..(28): Lactam ring formed between side chains at positions 24 and 28
HSQGTFTSDYSKYLDSRRAQDFVEWLMKT

SEQ ID NO: 16 - protein, 29 aa, Artificial Sequence
  Synthetic Glucagon Analogue
  MISC_FEATURE (12)..(16): Lactam ring between side chains at positions 12 and 16
  MISC_FEATURE (20)..(24): Lactam ring between side chains at positions 20 and 24
HSQGTFTSDYSKYLDERRAKDFVEWLMNT

SEQ ID NO: 17 - protein, 29 aa, Artificial Sequence
  Synthetic Glucagon Analogue
  MISC_FEATURE (16)..(20): Lactam ring between side chains at positions 16 and 20
  MISC_FEATURE (24)..(28): Lactam ring between side chains at positions 24 and 28
HSQGTFTSDYSKYLDERRADDFVEWLMKT

SEQ ID NO: 18 - protein, 29 aa, Artificial Sequence
  Synthetic Glucagon Analogue
  MISC_FEATURE (16)..(20): Lactam ring between side chains at positions 16 and 20
HSQGTFTSDYSKYLDERRAKDFVEWLMKT

SEQ ID NO: 19 - protein, 30 aa, Artificial Sequence
  Synthetic Glucagon Analogue
  MISC_FEATURE: c-term amidation
  MOD_RES (30)..(30): Variable amino acid
HSQGTFTSDYSKYLDERRAQDFVQWLMNTX

SEQ ID NO: 20 - protein, 29 aa, Artificial Sequence
  Synthetic Glucagon Analogue
  MOD_RES (16)..(16): Ser, Glu, Gln, homoglutamic acid or homocysteic acid
  MOD_RES (20)..(20): Gln, Lys, Arg, Orn or Citrulline
  MOD_RES (24)..(24): Gln or Glu
  MOD_RES (28)..(28): Asn, Asp or Lys
  MOD_RES (29)..(29): Thr or Gly
HSQGTFTSDYSKYLDXRRAXDFVXWLMXX

SEQ ID NO: 21 - protein, 29 aa, Artificial Sequence
  Synthetic Glucagon Analogue
  MISC_FEATURE: c-term amidation
  MOD_RES (2)..(2): Xaa is D-Ser, Ala, Gly, N-methyl Ser or AIB
HXQGTFTSDYSKYLDERRAQDFVQWLMNT

SEQ ID NO: 22 - protein, 29 aa, Artificial Sequence
  Synthetic Glucagon Analogue
  MISC_FEATURE: c-term amidation
  MOD_RES (2)..(2): Xaa is AIB
HXQGTFTSDYSKYLDERRAQDFVQWLMNT

SEQ ID NO: 23 - protein, 29 aa, Artificial Sequence
  Synthetic Glucagon Analogue
  MISC_FEATURE: c-term amidation
  MOD_RES (17)..(17): Cys-PEG
  MOD_RES (27)..(27): Met, Leu or Nle
HSQGTFTSDYSKYLDECRAQDFVQWLXNT

SEQ ID NO: 24 - protein, 29 aa, Artificial Sequence
  Synthetic Glucagon Analogue
  MISC_FEATURE: c-term amidation
  MOD_RES (21)..(21): Cys-PEG
  MOD_RES (27)..(27): Met, Leu or Nle
HSQGTFTSDYSKYLDERRAQCFVQWLXNT

SEQ ID NO: 25 - protein, 29 aa, Artificial Sequence
  Synthetic Glucagon Analogue
  MISC_FEATURE: c-term amidation
  MOD_RES (24)..(24): Cys-PEG
  MOD_RES (27)..(27): Met, Leu or Nle
HSQGTFTSDYSKYLDERRAQDFVCWLXNT

SEQ ID NO: 26 - protein, 11 aa, Artificial Sequence
  Synthetic peptide fragment representing the carboxy terminal 10 amino acids Exendin-4
  MISC_FEATURE (11)..(11): Xaa at position 11 is Lys or Cys
GPSSGAPPPSX

SEQ ID NO: 27 - protein, 9 aa, Artificial Sequence
  Synthetic peptide fragment representing the carboxy terminal 8 amino acids of oxyntomodulin
  MISC_FEATURE (9)..(9): Xaa at position 9 is Lys or Cys
KRNRNNIAX

SEQ ID NO: 28 - protein, 5 aa, Artificial Sequence
  Synthetic peptide
  MISC_FEATURE (5)..(5): Xaa at position 5 is Lys or Cys
KRNRX

SEQ ID NO: 29 - protein, 10 aa, Artificial Sequence
  Synthetic peptide fragment representing the carboxy terminal 10 amino acids of Exendin-4
  MISC_FEATURE: c-term amidation
GPSSGAPPPS

SEQ ID NO: 30 - protein, 39 aa, Artificial Sequence
  Synthetic Glucagon Analogue
  MOD_RES (27)..(27): Met, Leu or Nle
HSQGTFTSDYSKYLDERRAQDFVQWLXNTGPSSGAPPPS

SEQ ID NO: 31 - protein, 37 aa, Artificial Sequence
  Synthetic Glucagon Analogue
  MOD_RES (27)..(27): Met, Leu or Nle
HSQGTFTSDYSKYLDERRAQDFVQWLXNTKRNRNNIA

SEQ ID NO: 32 - protein, 33 aa, Artificial Sequence
  Synthetic Glucagon Analogue
  MOD_RES (27)..(27): Met, Leu or Nle
HSQGTFTSDYSKYLDERRAQDFVQWLXNTKRNR

SEQ ID NO: 33 - protein, 29 aa, Artificial Sequence
  Synthetic Glucagon Analogue
  MOD_RES (15)..(15): Asp, Glu, homoglutamic acid, cysteic acid or homocysteic acid
  MOD_RES (16)..(16): Ser, Glu, Gln, homoglutamic acid or homocysteic acid
  MOD_RES (20)..(20): Gln or Lys
  MOD_RES (24)..(24): Gln or Glu
  MOD_RES (28)..(28): Asn, Lys or an acidic amino acid
  MOD_RES (29)..(29): Thr, Gly or an acidic amino acid
HSQGTFTSDYSKYLXXRRAXDFVXWLMXX

SEQ ID NO: 34 - protein, 29 aa, Artificial Sequence
  Synthetic Glucagon Analogue
  MOD_RES (15)..(15): Asp, Glu, cysteic acid, homoglutamic acid or homocysteic acid
  MOD_RES (16)..(16): Ser, Glu, Gln, homoglutamic acid or homocysteic acid
  MOD_RES (20)..(20): Gln or Lys
  MOD_RES (24)..(24): Gln or Glu
  MOD_RES (28)..(28): Asn, Asp or Lys
  MOD_RES (29)..(29): Thr or Gly
HSQGTFTSDYSKYLDXRRAXDFVXWLMXX

SEQ ID NO: 35 - protein, 29 aa, Artificial Sequence
  Synthetic Glucagon Analogue
HSQGTFTSDYSKYLDSCRAQDFVQWLMNT

SEQ ID NO: 36 - protein, 39 aa, Artificial Sequence
  Synthetic Glucagon Analogue
HSQGTFTSDYSKYLDSRRAQDFVQWLMNTGPSSGAPPPS

SEQ ID NO: 37 - protein, 29 aa, Artificial Sequence
  Synthetic Glucagon Analogue
  MOD_RES (24)..(24): 2-butyrolactone bound through thiol group of Cys
HSQGTFTSDYSKYLDSRRAQDFVCWLMNT

SEQ ID NO: 38 - protein, 29 aa, Artificial Sequence
  Synthetic Glucagon Analogue
  MOD_RES (24)..(24): Carboxymethyl group bound through thiol group of Cys
HSQGTFTSDYSKYLDSRRAQDFVCWLMNT

SEQ ID NO: 39 - protein, 39 aa, Artificial Sequence
  Synthetic Glucagon Analogue
HSQGTFTSDYSRYLDSRRAQDFVQWLMNTGPSSGAPPPS

SEQ ID NO: 40 - protein, 29 aa, Artificial Sequence
  Synthetic Glucagon Analogue
  MISC_FEATURE: c-term amidation
  MOD_RES (15)..(15): Glu or Asp
  MOD_RES (28)..(28): Glu or Asp
HSQGTFTSDYSKYLXERRAQDFVQWLMXT

SEQ ID NO: 41 - protein, 29 aa, Artificial Sequence
  Synthetic Glucagon Analogue
  MISC_FEATURE: c-term amidation; lactam ring between side chains at positions 12 and 16
  MISC_FEATURE: c-term amidation
  MISC_FEATURE (12)..(16): Lactam ring between side chains at positions 12 and 16
  MOD_RES (15)..(15): Glu or Asp
  MOD_RES (28)..(28): Glu or Asp
HSQGTFTSDYSKYLXERRAQDFVQWLMXT

SEQ ID NO: 42 - protein, 29 aa, Artificial Sequence
  Synthetic Glucagon Analogue
  MISC_FEATURE: c-term amidation; lactam ring between side chains at positions 16 and 20
  MISC_FEATURE: c-term amidation
  MOD_RES (15)..(15): Glu or Asp
  MISC_FEATURE (16)..(20): Lactam ring between side chains at positions 16 and 20
  MOD_RES (28)..(28): Glu or Asp
HSQGTFTSDYSKYLXERRAKDFVQWLMXT

SEQ ID NO: 43 - protein, 29 aa, Artificial Sequence
  Synthetic Glucagon Analogue
  MISC_FEATURE: c-term amidation
  MOD_RES (15)..(15): Glu or Asp
  MISC_FEATURE (20)..(24): Lactam ring between side chains at positions 20 and 24
  MOD_RES (28)..(28): Glu or Asp
HSQGTFTSDYSKYLXSRRAKDFVEWLMXT

SEQ ID NO: 44 - protein, 29 aa, Artificial Sequence
  Synthetic Glucagon Analogue
  MISC_FEATURE: c-term amidation
  MOD_RES (15)..(15): Glu or Asp
  MISC_FEATURE (24)..(28): Lactam ring between side chains at positions 24 and 28
  MOD_RES (29)..(29): Glu or Thr
HSQGTFTSDYSKYLXSRRAQDFVEWLMKX

SEQ ID NO: 45 - protein, 29 aa, Artificial Sequence
  Synthetic Glucagon Analogue
  MOD_RES (12)..(12): Lys or Glu
  MOD_RES (15)..(15): Asp, Glu, homoglutamic acid, cysteic acid or homocysteic acid
  MOD_RES (16)..(16): Ser, Gln, Glu, Lys, homoglutamic acid, cysteic acid or homocysteic acid
  MOD_RES (20)..(20): Gln, Glu or Lys
  MOD_RES (24)..(24): Gln, Lys or Glu
  MOD_RES (28)..(28): Asn, Lys or an acidic amino acid
  MOD_RES (29)..(29): Thr, Gly or an acidic amino acid
HSQGTFTSDYSXYLXXRRAXDFVXWLMXX

SEQ ID NO: 46 - protein, 29 aa, Artificial Sequence
  Synthetic Glucagon Analogue
  MOD_RES (16)..(16): Ser, Glu, Gln, homoglutamic acid or homocysteic acid
  MOD_RES (20)..(20): Gln or Lys
  MOD_RES (24)..(24): Gln or Glu
HSQGTFTSDYSKYLDXRRAXDFVXWLMNT

SEQ ID NO: 47 - protein, 29 aa, Artificial Sequence
  Synthetic Glucagon Analogue
HSQGTFTSDYSKYLDERRAKDFVQWLMNT

SEQ ID NO: 48 - protein, 29 aa, Artificial Sequence
  Synthetic Glucagon Analogue
HSQGTFTSDYSKYLDSRRAKDFVEWLMNT

SEQ ID NO: 49 - protein, 29 aa, Artificial Sequence
  Synthetic Glucagon Analogue
HSQGTFTSDYSKYLDSRRAQDFVEWLMKT

SEQ ID NO: 50 - protein, 31 aa, Homo sapiens
HAEGTFTSDVSSYLEGQAAKEFIAWLVKGRG

SEQ ID NO: 51 - protein, 29 aa, Artificial Sequence
  Synthetic Glucagon Analogue
  MOD_RES (15)..(15): Asp, Glu, homoglutamic acid, cysteic acid or homocysteic acid
  MOD_RES (16)..(16): Ser, Glu, Gln, homoglutamic acid or homocysteic acid
  MOD_RES (20)..(20): Gln, Lys, Arg, Orn, or Citrulline
  MOD_RES (21)..(21): Asp, Glu, homoglutamic acid, or homocysteic acid
  MOD_RES (24)..(24): Gln or Glu
  MOD_RES (28)..(28): Asn, Lys or an acidic amino acid
  MOD_RES (29)..(29): Thr, Gly or an acidic amino acid
HSQGTFTSDYSKYLXXRRAXXFVXWLMXX

SEQ ID NO: 52 - protein, 30 aa, Artificial Sequence
  Synthetic peptide
  MISC_FEATURE: c-term amidation
HAEGTFTSDVSSYLEGQAAKEFIAWLVKGR

SEQ ID NO: 53 - protein, 29 aa, Artificial Sequence
  Synthetic Glucagon Analogue
  MOD_RES (3)..(3): Glu, Orn or Nle
  MOD_RES (15)..(15): Asp, Glu, homoglutamic acid, cysteic acid or homocysteic acid
  MOD_RES (16)..(16): Ser, Glu, Gln, homoglutamic acid or homocysteic acid
  MOD_RES (20)..(20): Gln or Lys
  MOD_RES (24)..(24): Gln or Glu
  MOD_RES (28)..(28): Asn, Lys or an acidic amino acid
  MOD_RES (29)..(29): Thr or an acidic amino acid
HSXGTFTSDYSKYLXXRRAXDFVXWLMXX

SEQ ID NO: 54 - protein, 29 aa, Artificial Sequence
  Synthetic Glucagon Analogue
  MOD_RES (17)..(17): Arg or Gln
  MOD_RES (18)..(18): Arg or Ala
  MOD_RES (21)..(21): Asp or Glu
  MOD_RES (23)..(23): Val or Ile
  MOD_RES (24)..(24): Gln or Ala
HSQGTFTSDYSKYLDEXXAKXFXXWLMNT

SEQ ID NO: 55 - protein, 29 aa, Artificial Sequence
  Synthetic Glucagon Analogue
  MOD_RES (1)..(1): His, D-His, (Des-amino)His, hydroxyl-His, acetyl-His, homo-His or alpha, alpha-dimethyl imidiazole acetic acid (DMIA), N-methyl His, alpha-methyl His, or imidazole acetic acid
  MOD_RES (2)..(2): Ser, D-Ser, Ala, D-Ala, Val, Gly, N-methyl Ser, AIB or N-methyl Ala
  MOD_RES (3)..(3): Gln, Glu, Orn or  Nle
  MOD_RES (10)..(10): Tyr or Trp
  MOD_RES (12)..(12): Lys, Citrulline, Orn or Arg
  MOD_RES (15)..(15): Asp, Glu, cysteic acid, homoglutamic acid and homocysteic acid
  MOD_RES (16)..(16): Ser, Glu, Gln, homoglutamic acid or homocysteic acid
  MOD_RES (17)..(17): Arg, Gln, Lys, Cys, Orn, homocysteine or acetyl phenylalanine
  MOD_RES (18)..(18): Arg, Ala, Lys, Cys, Orn, homocysteine or acetyl phenyalanine
  MOD_RES (20)..(20): Gln, Lys, Arg, Orn or Citrulline
  MOD_RES (21)..(21): Gln, Glu, Asp, Lys, Cys, Orn, homocystein or acetyl phenyalanine
  MOD_RES (23)..(23): Val or Ile
  MOD_RES (24)..(24): Ala, Gln, Glu, Lys, Cys, Orn, homocysteine or acetyl phenyalanine
  MOD_RES (27)..(27): Met, Leu or Nle
  MOD_RES (28)..(28): Asn, Arg, Citrulline, Orn, Lys or Asp
  MOD_RES (29)..(29): Thr, Gly, Lys, Cys, Orn, homocycsteine or acetyl phenyalanine
XXXGTFTSDXSXYLXXXXAXXFXXWLXXX

SEQ ID NO: 56 - protein, 29 aa, Artificial Sequence
  Synthetic Glucagon Analogue
  MOD_RES (1)..(1): His, D-His, (Des-amino)His, hydroxyl-His, acetyl-His, homo-His, DMIA, N-methyl His, alpha-methyl His, or imidazole acetic acid
  MOD_RES (2)..(2): Ser, D-Ser, Ala, D-Ala, Val, Gly, N-methyl Ser, AIB or N-methyl Ala
  MOD_RES (3)..(3): Gln, Glu, Orn or  Nle
  MOD_RES (15)..(15): Asp, Glu, cysteic acid, homoglutamic acid and homocysteic acid
  MOD_RES (16)..(16): Ser, Glu, Gln, homoglutamic acid or homocysteic acid
  MOD_RES (20)..(20): Gln, Lys, Arg, Orn or Citrulline
  MOD_RES (21)..(21): Gln, Glu, Asp, Cys, Orn, homocycstein or acetyl phenyalanine
  MOD_RES (23)..(23): Val or Ile
  MOD_RES (24)..(24): Ala, Gln, Glu, Cys, Orn, homocycsteine or acetyl phenyalanine
  MOD_RES (27)..(27): Met, Leu or Nle
  MOD_RES (28)..(28): Asn, Lys or Asp
  MOD_RES (29)..(29): Thr, Gly, Lys, Cys, Orn, homocycsteine or acetyl phenyalanine
XXXGTFTSDYSKYLXXRRAXXFXXWLXXX

SEQ ID NO: 57 - protein, 29 aa, Artificial Sequence
  Synthetic Glucagon Analogue
  MOD_RES (1)..(1): His, D-His, (Des-amino)His, hydroxyl-His, acetyl- His, homo-His, DMIA, N-methyl His, alpha-methyl His, or imidazole acetic acid
  MOD_RES (2)..(2): Ser, D-Ser, Ala, D-Ala, Val, Gly, N-methyl Ser, AIB or N-methyl Ala
  MOD_RES (3)..(3): Gln, Glu, Orn or  Nle
  MISC_FEATURE (12)..(16): Lactam ring between side changes at position 12 and 16
  MOD_RES (15)..(15): Asp, Glu, cysteic acid, homoglutamic acid and homocysteic acid
  MOD_RES (20)..(20): Gln, Lys, Arg, Orn or Citrulline
  MOD_RES (21)..(21): Gln, Glu, Asp, Cys, Orn, homocycsteine or acetyl phenyalanine
  MOD_RES (23)..(23): Val or Ile
  MOD_RES (24)..(24): Ala, Gln, Glu, Lys, Cys, Orn, homocysteine or acetyl Phe
  MOD_RES (27)..(27): Met, Leu or Nle
  MOD_RES (28)..(28): Asn, Lys or Asp
  MOD_RES (29)..(29): Thr, Gly, Lys, Cys, Orn, homocysteine or acetyl phenyalanine
XXXGTFTSDYSKYLXERRAXXFXXWLXXX

SEQ ID NO: 58 - protein, 29 aa, Artificial Sequence
  Synthetic Glucagon Analogue
  MOD_RES (1)..(1): His, D-His, (Des-amino)His, hydroxyl-His, acetyl-His, homo-His, DMIA, N-methyl His, alpha-methyl His, or imidazole acetic acid
  MOD_RES (2)..(2): Ser, D-Ser, Ala, D-Ala, Val, Gly, N-methyl Ser, AIB or N-methyl Ala
  MOD_RES (3)..(3): Gln, Glu, Orn or Nle
  MOD_RES (15)..(15): Asp, Glu, cysteic acid, homoglutamic acid or homocysteic acid
  MISC_FEATURE (16)..(20): Lactam ring between side chains at positions 16 and 20
  MOD_RES (21)..(21): Gln, Glu, Asp, Lys, Cys, Orn, homocysteine or acetyl phenyalanine
  MOD_RES (23)..(23): Val or Ile
  MOD_RES (24)..(24): Ala, Gln, Glu, Lys, Cys, Orn, homocysteine or acetyl phenyalanine
  MOD_RES (27)..(27): Met, Leu or Nle
  MOD_RES (28)..(28): Asn, Lys or Asp
  MOD_RES (29)..(29): Thr, Gly, Lys, Cys, Orn, homocysteine or acetyl phenyalanine
XXXGTFTSDYSKYLXERRAKXFXXWLXXX

SEQ ID NO: 59 - protein, 29 aa, Artificial Sequence
  Synthetic Glucagon Analogue
  MOD_RES (1)..(1): His, D-His, (Des-amino)His, hydroxyl-His, acetyl-His, homo-His, DMIA, N-methyl His, alpha-methyl His, or imidazole acetic acid
  MOD_RES (2)..(2): Ser, D-Ser, Ala, D-Ala, Val, Gly, N-methyl Ser, AIB, or N-methyl Ala
  MOD_RES (3)..(3): Gln, Glu, Orn or  Nle
  MOD_RES (15)..(15): Asp, Glu, cysteic acid, homoglutamic acid and homocysteic acid
  MOD_RES (16)..(16): Ser, Glu, Gln, homoglutamic acid or homocysteic acid
  MISC_FEATURE (20)..(24): Lactam ring between side chains at position 20 and 24
  MOD_RES (21)..(21): Gln, Glu, Asp, Lys, Cys, Orn, homocysteine or acetyl phenyalanine
  MOD_RES (23)..(23): Val or Ile
  MOD_RES (27)..(27): Met, Leu or Nle
  MOD_RES (28)..(28): Asn, Lys or Asp
  MOD_RES (29)..(29): Thr, Gly, Lys, Cys, Orn, homocysteine or acetyl pheylalanine
XXXGTFTSDYSKYLXXRRAKXFXEWLXXX

SEQ ID NO: 60 - protein, 29 aa, Artificial Sequence
  Synthetic Glucagon Analogue
  MOD_RES (1)..(1): His, D-His, (Des-amino)His, hydroxyl-His, acetyl-His, homo-His, DMIA, N-methyl His, alpha-methyl His, or imidazole acetic acid
  MOD_RES (2)..(2): Ser, D-Ser, Ala, D-Ala, Val, Gly, N-methyl Ser, AIB or N-methyl Ala
  MOD_RES (3)..(3): Gln, Glu, Orn or  Nle
  MOD_RES (15)..(15): Asp, Glu, cysteic acid, homoglutamic acid and homocysteic acid
  MOD_RES (16)..(16): Ser, Glu, Gln, homoglutamic acid or homocysteic acid
  MOD_RES (20)..(20): Gln, Lys, Arg, Orn, or Citrulline
  MOD_RES (21)..(21): Gln, Glu, Asp, Lys, Cys, Orn, homocysteine or acetyl phenyalanine
  MOD_RES (23)..(23): Val or Ile
  MISC_FEATURE (24)..(28): Lactam ring between side chains at position 24 and 28
  MOD_RES (27)..(27): Met, Leu or Nle
  MOD_RES (29)..(29): Thr, Gly, Lys, Cys, Orn, homocysteine or acetyl phenyalanine
XXXGTFTSDYSKYLXXRRAXXFXEWLXKX

SEQ ID NO: 61 - protein, 40 aa, Artificial Sequence
  Synthetic Glucagon Analogue
  MISC_FEATURE: positions 30 to 40 are present only if position 29 is Gly; see specification as filed for detailed description of substitutions and preferred embodiments
  MOD_RES (1)..(1): His, D-His, (Des-amino)His, hydroxyl-His, acetyl-His, homo-His, DMIA, N-methyl His, alpha-methyl His, or imidazole acetic acid
  MOD_RES (2)..(2): Ser, D-Ser, Ala, Val, Gly, N-methyl Ser, Aib, N-methyl, Ala or D-Ala
  MOD_RES (18)..(18): Ala or Arg
  MOD_RES (24)..(24): Ala, Gln or Cys-PEG
  MOD_RES (29)..(29): Thr-CONH2, Cys-PEG, or Gly
  MOD_RES (40)..(40): Cys-PEG or not present
XXQGTFTSDYSKYLDERXAKDFVXWLMNXGPSSGAPPPSC

SEQ ID NO: 62 - protein, 40 aa, Artificial Sequence
  Synthetic Glucagon Analogue
  MISC_FEATURE: positions 30 to 40 are present only if position 29 is Gly; see specification as filed for detailed description of substitutions and preferred embodiments
  MOD_RES (1)..(1): His, D-His, (Des-amino)His, hydroxyl-His, acetyl-His, homo-His, DMIA, N-methyl His, alpha-methyl His, or imidazole acetic acid
  MOD_RES (2)..(2): Ser, D-Ser, Ala, Val, Gly, N-methyl Ser, AIB0, N-methyl Ala, or D-Ala
  MOD_RES (18)..(18): Ala or Arg
  MOD_RES (24)..(24): Ala, Gln or Cys-PEG
  MOD_RES (29)..(29): Thr-CONH2, Cys-PEG, or Gly
  MOD_RES (40)..(40): Cys-PEG or not present
XXQGTFTSDYSKYLDEQXAKEFIXWLMNXGPSSGAPPPSC

SEQ ID NO: 63 - protein, 29 aa, Artificial Sequence
  Synthetic Glucagon Analogue
  MOD_RES (16)..(16): Ser, Glu, Gln, homoglutamic acid or homocysteic acid
  MOD_RES (20)..(20): Gln or Lys
  MOD_RES (21)..(21): Asp, Lys, Cys, Orn, homocysteine or acetyl phealanine
  MOD_RES (24)..(24): Gln, Lys, Cys, Orn, homocysteine or acetyl phealanine
  MOD_RES (27)..(27): Met, Leu or Nle
HSQGTFTSDYSKYLDXRRAXXFVXWLXNT

SEQ ID NO: 64 - protein, 38 aa, Artificial Sequence
  Synthetic Glucagon Analogue
  MOD_RES (15)..(15): Asp, Glu, homoglutamic acid, cysteic acid or homocysteic acid
  MOD_RES (16)..(16): Ser, Glu, Gln, homoglutamic acid or homocysteic acid
  MOD_RES (20)..(20): Gln or Lys
  MOD_RES (24)..(24): Gln or Glu
  MOD_RES (28)..(28): Asn, Lys or Asp
HSQGTFTSDYSKYLXXRRAXDFVXWLMXGGPSSGPPPS

SEQ ID NO: 65 - protein, 11 aa, Artificial Sequence
  Synthetic peptide fragment representing the carboxy terminal 10 amino acids of Exdendin-4
  MOD_RES (11)..(11): Cys-PEG
GPSSGAPPPSC

SEQ ID NO: 66 - protein, 29 aa, Artificial Sequence
  Synthetic Glucagon Analogue
  MISC_FEATURE (12)..(16): Lactam ring between side chains at positions 12 and 16
  MOD_RES (28)..(28): Asp or Asn
  MOD_RES (29)..(29): Thr or Gly
HSQGTFTSDYSKYLDERRAQDFVQWLMXX

SEQ ID NO: 67 - protein, 29 aa, Artificial Sequence
  Synthetic Glucagon Analogue
  MISC_FEATURE (16)..(20): Lactam ring between side chains at positions 16 and 20
  MOD_RES (28)..(28): Asp or Asn
  MOD_RES (29)..(29): Thr or Gly
HSQGTFTSDYSKYLDERRAKDFVQWLMXX

SEQ ID NO: 68 - protein, 29 aa, Artificial Sequence
  Synthetic Glucagon Analogue
  MISC_FEATURE (20)..(24): Lactam ring between side chains at positions 20 and 24
  MOD_RES (28)..(28): Asp or Asn
  MOD_RES (29)..(29): Thr or Gly
HSQGTFTSDYSKYLDSRRAKDFVEWLMXX

SEQ ID NO: 69 - protein, 29 aa, Artificial Sequence
  glucagon analogue
  MISC_FEATURE (24)..(28): Lactam ring between side chains at positions 24 and 28
  MOD_RES (29)..(29): Thr or Gly
HSQGTFTSDYSKYLDSRRAQDFVEWLMKX

SEQ ID NO: 70 - protein, 29 aa, Artificial Sequence
  Synthetic peptide
  MISC_FEATURE: c-term amidation
HSQGTFTSDYSKYLDERRAQDFVQWLMNT

SEQ ID NO: 71 - protein, 29 aa, Artificial Sequence
  Synthetic peptide
  MISC_FEATURE: c-term amidation
HSQGTFTSDYSKYLDERRAKDFVQWLMNT

SEQ ID NO: 72 - protein, 29 aa, Artificial Sequence
  Synthetic peptide
  MISC_FEATURE: c-term amidation
  MISC_FEATURE (16)..(20): Lactam ring between side chains at positions 16 and 20
HSQGTFTSDYSKYLDERRAKDFVQWLMNT

SEQ ID NO: 73 - protein, 29 aa, Artificial Sequence
  Synthetic peptide
  MISC_FEATURE: c-term amidation
  MISC_FEATURE (12)..(16): Lactam ring between side chains at positions 12 and 16
HSQGTFTSDYSKYLDERRAQDFVQWLMNT

SEQ ID NO: 74 - protein, 29 aa, Artificial Sequence
  Synthetic peptide
  MISC_FEATURE: c-term amidation
  MISC_FEATURE (12)..(16): Lactam ring between side chains at positions 12 and 16
HSQGTFTSDYSKYLDERRAKDFVQWLMNT

SEQ ID NO: 75 - protein, 29 aa, Artificial Sequence
  Synthetic peptide
  MISC_FEATURE: c-term amidation
  MISC_FEATURE (16)..(20): Lactam ring between side chains at positions 16 and 20
HSQGTFTSDYSKYLDKRRAEDFVQWLMNT

SEQ ID NO: 76 - protein, 29 aa, Artificial Sequence
  Synthetic peptide
  MISC_FEATURE: c-term amidation
HSQGTFTSDYSKYLDERAAKDFVQWLMNT

SEQ ID NO: 77 - protein, 29 aa, Artificial Sequence
  Synthetic Polypeptide
  MISC_FEATURE: c-term amidation
  MISC_FEATURE (16)..(20): Lactam ring between side chains at positions 16 and 20
HSQGTFTSDYSKYLDERAAKDFVQWLMNT

SEQ ID NO: 78 - protein, 29 aa, Artificial Sequence
  Synthetic Polypeptide
  MISC_FEATURE: c-term amidation
  MISC_FEATURE (12)..(16): Lactam ring between side chains at positions 12 and 16
HSQGTFTSDYSKYLDERAAQDFVQWLMNT

SEQ ID NO: 79 - protein, 29 aa, Artificial Sequence
  Synthetic Polypeptide
  MISC_FEATURE: c-term amidation
  MISC_FEATURE (12)..(16): Lactam ring between side chains at positions 12 and 16
HSQGTFTSDYSKYLDERAAKDFVQWLMNT

SEQ ID NO: 80 - protein, 29 aa, Artificial Sequence
  Synthetic Polypeptide
  MISC_FEATURE: c-term amidation
  MISC_FEATURE (16)..(20): Lactam ring between side chains at positions 16 and 20
HSQGTFTSDYSKYLDKRAAEDFVQWLMNT

SEQ ID NO: 81 - protein, 29 aa, Artificial Sequence
  Synthetic Polypeptide
  MISC_FEATURE: c-term amidation
HSQGTFTSDYSKYLDEQAAKEFIAWLMNT

SEQ ID NO: 82 - protein, 29 aa, Artificial Sequence
  Synthetic Polypeptide
  MISC_FEATURE: c-term amidation
  MISC_FEATURE (12)..(16): Lactam ring between side chains at positions 12 and 16
HSQGTFTSDYSKYLDEQAAKEFIAWLMNT

SEQ ID NO: 83 - protein, 29 aa, Artificial Sequence
  Synthetic Polypeptide
  MISC_FEATURE: c-term amidation
  MISC_FEATURE (16)..(20): Lactam ring between side chains at positions 16 and 20
HSQGTFTSDYSKYLDEQAAKEFIAWLMNT

SEQ ID NO: 84 - protein, 29 aa, Artificial Sequence
  Synthetic Polypeptide
  MISC_FEATURE: c-term amidation
HSQGTFTSDYSKYLDEQAAKEFIAWLVKG

SEQ ID NO: 85 - protein, 29 aa, Artificial Sequence
  Synthetic Polypeptide
  MISC_FEATURE: c-term amidation
  MISC_FEATURE (12)..(16): Lactam ring between side chains at positions 12 and 16
HSQGTFTSDYSKYLDEQAAKEFIAWLVKG

SEQ ID NO: 86 - protein, 29 aa, Artificial Sequence
  Synthetic Polypeptide
  MISC_FEATURE: c-term amidation
  MISC_FEATURE (16)..(20): Lactam ring between side chains at positions 16 and 20
HSQGTFTSDYSKYLDEQAAKEFIAWLVKG

SEQ ID NO: 87 - protein, 29 aa, Artificial Sequence
  Synthetic Polypeptide
  MISC_FEATURE: c-term amidation
  MOD_RES (1)..(1): (Des-amino)His
XSQGTFTSDYSKYLDERRAQDFVQWLMNT

SEQ ID NO: 88 - protein, 29 aa, Artificial Sequence
  Synthetic Polypeptide
  MISC_FEATURE: c-term amidation
  MOD_RES (1)..(1): (Des-amino)His
XSQGTFTSDYSKYLDERRAKDFVQWLMNT

SEQ ID NO: 89 - protein, 29 aa, Artificial Sequence
  Synthetic Polypeptide
  MISC_FEATURE: c-term amidation
  MOD_RES (1)..(1): (Des-amino)His
  MISC_FEATURE (16)..(20): Lactam ring between side chains at positions 16 and 20
XSQGTFTSDYSKYLDERRAKDFVQWLMNT

SEQ ID NO: 90 - protein, 29 aa, Artificial Sequence
  Synthetic Polypeptide
  MISC_FEATURE: c-term amidation
  MOD_RES (1)..(1): (Des-amino)His
  MISC_FEATURE (12)..(16): Lactam ring between side chains at positions 12 and 16
XSQGTFTSDYSKYLDERRAQDFVQWLMNT

SEQ ID NO: 91 - protein, 29 aa, Artificial Sequence
  Synthetic Polypeptide
  MISC_FEATURE: c-term amidation
  MOD_RES (1)..(1): (Des-amino)His
  MISC_FEATURE (12)..(16): Lactam ring between side chains at positions 12 and 16
XSQGTFTSDYSKYLDERRAKDFVQWLMNT

SEQ ID NO: 92 - protein, 29 aa, Artificial Sequence
  Synthetic Polypeptide
  MISC_FEATURE: c-term amidation
  MOD_RES (1)..(1): (Des-amino)His
  MISC_FEATURE (16)..(20): Lactam ring between side chains at positions 16 and 20
XSQGTFTSDYSKYLDKRRAEDFVQWLMNT

SEQ ID NO: 93 - protein, 29 aa, Artificial Sequence
  Synthetic Polypeptide
  MOD_RES (1)..(1): (Des-amino)His
  MISC_FEATURE (29)..(29): c-term amidation
XSQGTFTSDYSKYLDERAAKDFVQWLMNT

SEQ ID NO: 94 - protein, 29 aa, Artificial Sequence
  Synthetic Polypeptide
  MISC_FEATURE: c-term amidation
  MOD_RES (1)..(1): (Des-amino)His
  MISC_FEATURE (16)..(20): Lactam ring between side chains at positions 16 and 20
XSQGTFTSDYSKYLDERAAKDFVQWLMNT

SEQ ID NO: 95 - protein, 29 aa, Artificial Sequence
  Synthetic Polypeptide
  MISC_FEATURE: c-term amidation
  MOD_RES (1)..(1): (Des-amino)His
  MISC_FEATURE (12)..(16): Lactam ring between side chains at positions 12 and 16
XSQGTFTSDYSKYLDERAAQDFVQWLMNT

SEQ ID NO: 96 - protein, 29 aa, Artificial Sequence
  Synthetic Polypeptide
  MISC_FEATURE: c-term amidation
  MOD_RES (1)..(1): (Des-amino)His
  MISC_FEATURE (12)..(16): Lactam ring between side chains at positions 12 and 16
XSQGTFTSDYSKYLDERAAKDFVQWLMNT

SEQ ID NO: 97 - protein, 29 aa, Artificial Sequence
  Synthetic Polypeptide
  MISC_FEATURE: c-term amidation
  MOD_RES (1)..(1): (Des-amino)His
  MISC_FEATURE (16)..(20): Lactam ring between side chains at positions 16 and 20
XSQGTFTSDYSKYLDKRAAEDFVQWLMNT

SEQ ID NO: 98 - protein, 29 aa, Artificial Sequence
  Synthetic Polypeptide
  MISC_FEATURE: c-term amidation
  MOD_RES (1)..(1): (Des-amino)His
  MISC_FEATURE (12)..(16): Lactam ring between side chains at positions 12 and 16
XSQGTFTSDYSKYLDEQAAKEFIAWLMNT

SEQ ID NO: 99 - protein, 29 aa, Artificial Sequence
  Synthetic Polypeptide
  MISC_FEATURE: c-term amidation
  MOD_RES (1)..(1): (Des-amino)His
  MISC_FEATURE (12)..(16): Lactam ring between side chains at positions 12 and 16
XSQGTFTSDYSKYLDEQAAKEFIAWLMNT

SEQ ID NO: 100 - protein, 29 aa, Artificial Sequence
  Synthetic Polypeptide
  MISC_FEATURE: c-term amidation
  MOD_RES (1)..(1): (Des-amino)His
  MISC_FEATURE (16)..(20): Lactam ring between side chains at positions 16 and 20
XSQGTFTSDYSKYLDEQAAKEFIAWLMNT

SEQ ID NO: 101 - protein, 29 aa, Artificial Sequence
  Synthetic Polypeptide
  MISC_FEATURE: c-term amidation
  MOD_RES (1)..(1): (Des-amino)His
XSQGTFTSDYSKYLDEQAAKEFIAWLVKG

SEQ ID NO: 102 - protein, 29 aa, Artificial Sequence
  Synthetic Polypeptide
  MISC_FEATURE: C-terminal amidation
  MOD_RES (1)..(1): (Des-amino)His
  MISC_FEATURE (12)..(16): Lactam ring between side chains at positions 12 and 16
XSQGTFTSDYSKYLDEQAAKEFIAWLVKG

SEQ ID NO: 103 - protein, 29 aa, Artificial Sequence
  Synthetic Polypeptide
  MISC_FEATURE: C-terminal amidation
  MOD_RES (1)..(1): (Des-amino)His
  MISC_FEATURE (16)..(20): Lactam ring between side chains at positions 16 and 20
XSQGTFTSDYSKYLDEQAAKEFIAWLVKG

SEQ ID NO: 104 - protein, 29 aa, Artificial Sequence
  Synthetic Polypeptide
  MOD_RES (2)..(2): Xaa is AIB
  MOD_RES (29)..(29): C-terminal amidation
HXQGTFTSDYSKYLDERRAQDFVQWLMNT

SEQ ID NO: 105 - protein, 29 aa, Artificial Sequence
  Synthetic Polypeptide
  MOD_RES (2)..(2): Xaa is AIB
  MISC_FEATURE (16)..(20): Lactam ring between side chains at positions 16 and 20
  MOD_RES (29)..(29): C-terminal amidation
HXQGTFTSDYSKYLDERRAKDFVQWLMNT

SEQ ID NO: 106 - protein, 29 aa, Artificial Sequence
  Synthetic Polypeptide
  MOD_RES (2)..(2): Xaa is AIB
  MISC_FEATURE (16)..(20): Lactam ring between side chains at positions 16 and 20
  MOD_RES (29)..(29): C-terminal amidation
HXQGTFTSDYSKYLDERRAKDFVQWLMNT

SEQ ID NO: 107 - protein, 29 aa, Artificial Sequence
  Synthetic Polypeptide
  MOD_RES (2)..(2): Xaa is AIB
  MISC_FEATURE (12)..(16): Lactam ring between side chains at positions 12 and 16
  MOD_RES (29)..(29): C-terminal amidation
HXQGTFTSDYSKYLDERRAQDFVQWLMNT

SEQ ID NO: 108 - protein, 29 aa, Artificial Sequence
  Synthetic Polypeptide
  MOD_RES (2)..(2): Xaa is AIB
  MISC_FEATURE (12)..(16): Lactam ring between side chains at positions 12 and 16
  MOD_RES (29)..(29): C-terminal amidation
HXQGTFTSDYSKYLDERRAKDFVQWLMNT

SEQ ID NO: 109 - protein, 29 aa, Artificial Sequence
  Synthetic Polypeptide
  MOD_RES (2)..(2): Xaa is AIB
  MISC_FEATURE (16)..(20): Lactam ring between side chains at positions 16 and 20
  MOD_RES (29)..(29): C-terminal amidation
HXQGTFTSDYSKYLDKRRAEDFVQWLMNT

SEQ ID NO: 110 - protein, 29 aa, Artificial Sequence
  Synthetic Polypeptide
  MOD_RES (2)..(2): Xaa is AIB
  MOD_RES (29)..(29): C-terminal amidation
HXQGTFTSDYSKYLDERAAKDFVQWLMNT

SEQ ID NO: 111 - protein, 29 aa, Artificial Sequence
  Synthetic Polypeptide
  MOD_RES (2)..(2): Xaa is AIB
  MISC_FEATURE (16)..(20): Lactam ring between side chains at positions 16 and 20
  MOD_RES (29)..(29): C-terminal amidation
HXQGTFTSDYSKYLDERAAKDFVQWLMNT

SEQ ID NO: 112 - protein, 29 aa, Artificial Sequence
  Synthetic Polypeptide
  MOD_RES (2)..(2): Xaa is AIB
  MISC_FEATURE (12)..(16): Lactam ring between side chains at positions 12 and 16
  MOD_RES (29)..(29): C-terminal amidation
HXQGTFTSDYSKYLDERAAQDFVQWLMNT

SEQ ID NO: 113 - protein, 29 aa, Artificial Sequence
  glucagon analog
  MOD_RES (2)..(2): Xaa is AIB
  MISC_FEATURE (12)..(16): Lactam ring between side chains at positions 12 and 16
  MOD_RES (29)..(29): C-terminal amidation
HXQGTFTSDYSKYLDERAAKDFVQWLMNT

SEQ ID NO: 114 - protein, 29 aa, Artificial Sequence
  glucagon analog
  MOD_RES (2)..(2): Xaa is AIB
  MISC_FEATURE (16)..(20): Lactam ring between side chains at positions 16 and 20
  MOD_RES (29)..(29): C-terminal amidation
HXQGTFTSDYSKYLDKRAAEDFVQWLMNT

SEQ ID NO: 115 - protein, 29 aa, Artificial Sequence
  glucagon analog
  MOD_RES (2)..(2): Xaa is AIB
  MOD_RES (29)..(29): C-terminal amidation
HXQGTFTSDYSKYLDEQAAKEFIAWLMNT

SEQ ID NO: 116 - protein, 29 aa, Artificial Sequence
  glucagon analog
  MOD_RES (2)..(2): Xaa is AIB
  MISC_FEATURE (12)..(16): Lactam ring between side chains at positions 12 and 16
  MOD_RES (29)..(29): C-terminal amidation
HXQGTFTSDYSKYLDEQAAKEFIAWLMNT

SEQ ID NO: 117 - protein, 29 aa, Artificial Sequence
  glucagon analog
  MOD_RES (2)..(2): Xaa is AIB
  MISC_FEATURE (16)..(20): Lactam ring between side chains at positions 16 and 20
  MOD_RES (29)..(29): C-terminal amidation
HXQGTFTSDYSKYLDEQAAKEFIAWLMNT

SEQ ID NO: 118 - protein, 29 aa, Artificial Sequence
  glucagon analog
  MOD_RES (2)..(2): Xaa is AIB
  MOD_RES (29)..(29): C-terminal amidation
HXQGTFTSDYSKYLDEQAAKEFIAWLVKG

SEQ ID NO: 119 - protein, 29 aa, Artificial Sequence
  glucagon analog
  MOD_RES (2)..(2): Xaa is AIB
  MISC_FEATURE (12)..(16): Lactam ring between side chains at positions 12 and 16
  MOD_RES (29)..(29): C-terminal amidation
HXQGTFTSDYSKYLDEQAAKEFIAWLVKG

SEQ ID NO: 120 - protein, 29 aa, Artificial Sequence
  glucagon analog
  MOD_RES (2)..(2): Xaa is AIB
  MISC_FEATURE (16)..(20): Lactam ring between side chains at positions 16 and 20
  MOD_RES (29)..(29): C-terminal amidation
HXQGTFTSDYSKYLDEQAAKEFIAWLVKG

SEQ ID NO: 121 - protein, 29 aa, Artificial Sequence
  glucagon analog
  MOD_RES (2)..(2): D-Ala
  MOD_RES (29)..(29): C-terminal amidation
HXQGTFTSDYSKYLDERRAQDFVQWLMNT

SEQ ID NO: 122 - protein, 29 aa, Artificial Sequence
  glucagon analog
  MOD_RES (2)..(2): D-Ala
  MOD_RES (29)..(29): C-terminal amidation
HXQGTFTSDYSKYLDERRAKDFVQWLMNT

SEQ ID NO: 123 - protein, 29 aa, Artificial Sequence
  glucagon analog
  MOD_RES (2)..(2): D-Ala
  MISC_FEATURE (16)..(20): Lactam ring between side chains at positions 16 and 20
  MOD_RES (29)..(29): C-terminal amidation
HXQGTFTSDYSKYLDERRAKDFVQWLMNT

SEQ ID NO: 124 - protein, 29 aa, Artificial Sequence
  glucagon analog
  MOD_RES (2)..(2): D-Ala
  MISC_FEATURE (12)..(16): Lactam ring between side chains at positions 12 and 16
  MOD_RES (29)..(29): C-terminal amidation
HXQGTFTSDYSKYLDERRAQDFVQWLMNT

SEQ ID NO: 125 - protein, 29 aa, Artificial Sequence
  glucagon analog
  MOD_RES (2)..(2): D-Ala
  MISC_FEATURE (12)..(16): Lactam ring between side chains at positions 12 and 16
  MOD_RES (29)..(29): C-terminal amidation
HXQGTFTSDYSKYLDERRAKDFVQWLMNT

SEQ ID NO: 126 - protein, 29 aa, Artificial Sequence
  glucagon analog
  MOD_RES (2)..(2): D-Ala
  MISC_FEATURE (16)..(20): Lactam ring between side chains at positions 16 and 20
  MOD_RES (29)..(29): C-terminal amidation
HXQGTFTSDYSKYLDKRRAEDFVQWLMNT

SEQ ID NO: 127 - protein, 29 aa, Artificial Sequence
  glucagon analog
  MOD_RES (2)..(2): D-Ala
  MOD_RES (29)..(29): C-terminal amidation
HXQGTFTSDYSKYLDERAAKDFVQWLMNT

SEQ ID NO: 128 - protein, 29 aa, Artificial Sequence
  glucagon analog
  MOD_RES (2)..(2): D-Ala
  MISC_FEATURE (16)..(20): Lactam ring between side chains at positions 16 and 20
  MOD_RES (29)..(29): C-terminal amidation
HXQGTFTSDYSKYLDERAAKDFVQWLMNT

SEQ ID NO: 129 - protein, 29 aa, Artificial Sequence
  glucagon analog
  MOD_RES (2)..(2): D-Ala
  MISC_FEATURE (12)..(16): Lactam ring between side chains at positions 12 and 16
  MOD_RES (29)..(29): C-terminal amidation
HXQGTFTSDYSKYLDERAAQDFVQWLMNT

SEQ ID NO: 130 - protein, 29 aa, Artificial Sequence
  glucagon analog
  MOD_RES (2)..(2): D-Ala
  MISC_FEATURE (12)..(16): Lactam ring between side chains at positions 12 and 16
  MOD_RES (29)..(29): C-terminal amidation
HXQGTFTSDYSKYLDERAAKDFVQWLMNT

SEQ ID NO: 131 - protein, 29 aa, Artificial Sequence
  glucagon analog
  MOD_RES (2)..(2): D-Ala
  MISC_FEATURE (16)..(20): Lactam ring between side chains at positions 16 and 20
  MOD_RES (29)..(29): C-terminal amidation
HXQGTFTSDYSKYLDKRAAEDFVQWLMNT

SEQ ID NO: 132 - protein, 29 aa, Artificial Sequence
  glucagon analog
  MOD_RES (2)..(2): D-Ala
  MOD_RES (29)..(29): C-terminal amidation
HXQGTFTSDYSKYLDEQAAKEFIAWLMNT

SEQ ID NO: 133 - protein, 29 aa, Artificial Sequence
  glucagon analog
  MOD_RES (2)..(2): D-Ala
  MISC_FEATURE (12)..(16): Lactam ring between side chains at positions 12 and 16
  MOD_RES (29)..(29): C-terminal amidation
HXQGTFTSDYSKYLDEQAAKEFIAWLMNT

SEQ ID NO: 134 - protein, 29 aa, Artificial Sequence
  glucagon analog
  MOD_RES (2)..(2): D-Ala
  MISC_FEATURE (16)..(20): Lactam ring between side chains at positions 16 and 20
  MOD_RES (29)..(29): C-terminal amidation
HXQGTFTSDYSKYLDEQAAKEFIAWLMNT

SEQ ID NO: 135 - protein, 29 aa, Artificial Sequence
  glucagon analog
  MOD_RES (2)..(2): D-Ala
  MOD_RES (29)..(29): C-terminal amidation
HXQGTFTSDYSKYLDEQAAKEFIAWLVKG

SEQ ID NO: 136 - protein, 29 aa, Artificial Sequence
  glucagon analog
  MOD_RES (2)..(2): D-Ala
  MISC_FEATURE (12)..(16): Lactam ring between side chains at positions 12 and 16
  MOD_RES (29)..(29): C-terminal amidation
HXQGTFTSDYSKYLDEQAAKEFIAWLVKG

SEQ ID NO: 137 - protein, 29 aa, Artificial Sequence
  glucagon analog
  MOD_RES (2)..(2): D-Ala
  MISC_FEATURE (16)..(20): Lactam ring between side chains at positions 16 and 20
  MOD_RES (29)..(29): C-terminal amidation
HXQGTFTSDYSKYLDEQAAKEFIAWLVKG

SEQ ID NO: 138 - protein, 29 aa, Artificial Sequence
  glucagon analog
  MOD_RES (29)..(29): C-terminal amidation
HSEGTFTSDYSKYLDERRAQDFVQWLMNT

SEQ ID NO: 139 - protein, 29 aa, Artificial Sequence
  glucagon analog
  MOD_RES (29)..(29): C-terminal amidation
HSEGTFTSDYSKYLDERRAKDFVQWLMNT

SEQ ID NO: 140 - protein, 29 aa, Artificial Sequence
  glucagon analog
  MISC_FEATURE (16)..(20): Lactam ring between side chains at positions 16 and 20
  MOD_RES (29)..(29): C-terminal amidation
HSEGTFTSDYSKYLDERRAKDFVQWLMNT

SEQ ID NO: 141 - protein, 29 aa, Artificial Sequence
  glucagon analog
  MISC_FEATURE (12)..(16): Lactam ring between side chains at positions 12 and 16
  MOD_RES (29)..(29): C-terminal amidation
HSEGTFTSDYSKYLDERRAQDFVQWLMNT

SEQ ID NO: 142 - protein, 29 aa, Artificial Sequence
  glucagon analog
  MISC_FEATURE (12)..(16): Lactam ring between side chains at positions 12 and 16
  MOD_RES (29)..(29): C-terminal amidation
HSEGTFTSDYSKYLDERRAKDFVQWLMNT

SEQ ID NO: 143 - protein, 29 aa, Artificial Sequence
  glucagon analog
  MISC_FEATURE (16)..(20): Lactam ring between side chains at positions 16 and 20
  MOD_RES (29)..(29): C-terminal amidation
HSEGTFTSDYSKYLDKRRAEDFVQWLMNT

SEQ ID NO: 144 - protein, 29 aa, Artificial Sequence
  glucagon analog
  MOD_RES (29)..(29): C-terminal amidation
HSEGTFTSDYSKYLDERAAKDFVQWLMNT

SEQ ID NO: 145 - protein, 29 aa, Artificial Sequence
  glucagon analog
  MISC_FEATURE (16)..(20): Lactam ring between side chains at positions 16 and 20
  MOD_RES (29)..(29): C-terminal amidation
HSEGTFTSDYSKYLDERAAKDFVQWLMNT

SEQ ID NO: 146 - protein, 29 aa, Artificial Sequence
  glucagon analog
  MISC_FEATURE (12)..(16): Lactam ring between side chains at positions 12 and 16
  MOD_RES (29)..(29): C-terminal amidation
HSEGTFTSDYSKYLDERAAQDFVQWLMNT

SEQ ID NO: 147 - protein, 29 aa, Artificial Sequence
  glucagon analog
  MISC_FEATURE (12)..(16): Lactam ring between side chains at positions 12 and 16
  MOD_RES (29)..(29): C-terminal amidation
HSEGTFTSDYSKYLDERAAKDFVQWLMNT

SEQ ID NO: 148 - protein, 29 aa, Artificial Sequence
  glucagon analog
  MISC_FEATURE (16)..(20): Lactam ring between side chains at positions 16 and 20
  MOD_RES (29)..(29): C-terminal amidation
HSEGTFTSDYSKYLDKRAAEDFVQWLMNT

SEQ ID NO: 149 - protein, 29 aa, Artificial Sequence
  glucagon analog
  MOD_RES (29)..(29): C-terminal amidation
HSEGTFTSDYSKYLDEQAAKEFIAWLMNT

SEQ ID NO: 150 - protein, 29 aa, Artificial Sequence
  glucagon analog
  MISC_FEATURE (12)..(16): Lactam ring between side chains at positions 12 and 16
  MOD_RES (29)..(29): C-terminal amidation
HSEGTFTSDYSKYLDEQAAKEFIAWLMNT

SEQ ID NO: 151 - protein, 29 aa, Artificial Sequence
  glucagon analog
  MISC_FEATURE (16)..(20): Lactam ring between side chains at positions 16 and 20
  MOD_RES (29)..(29): C-terminal amidation
HSEGTFTSDYSKYLDEQAAKEFIAWLMNT

SEQ ID NO: 152 - protein, 29 aa, Artificial Sequence
  glucagon analog
  MOD_RES (29)..(29): C-terminal amidation
HSEGTFTSDYSKYLDEQAAKEFIAWLVKG

SEQ ID NO: 153 - protein, 29 aa, Artificial Sequence
  glucagon analog
  MISC_FEATURE (12)..(16): Lactam ring between side chains at positions 12 and 16
  MOD_RES (29)..(29): C-terminal amidation
HSEGTFTSDYSKYLDEQAAKEFIAWLVKG

SEQ ID NO: 154 - protein, 29 aa, Artificial Sequence
  glucagon analog
  MISC_FEATURE (16)..(20): Lactam ring between side chains at positions 16 and 20
  MOD_RES (29)..(29): C-terminal amidation
HSEGTFTSDYSKYLDEQAAKEFIAWLVKG

SEQ ID NO: 155 - protein, 29 aa, Artificial Sequence
  glucagon analog
  MOD_RES (1)..(1): (Des-amino)His
  MOD_RES (29)..(29): C-terminal amidation
XSEGTFTSDYSKYLDERRAQDFVQWLMNT

SEQ ID NO: 156 - protein, 29 aa, Artificial Sequence
  glucagon analog
  MOD_RES (1)..(1): (Des-amino)His
  MOD_RES (29)..(29): C-terminal amidation
XSEGTFTSDYSKYLDERRAKDFVQWLMNT

SEQ ID NO: 157 - protein, 29 aa, Artificial Sequence
  glucagon analog
  MOD_RES (1)..(1): (Des-amino)His
  MISC_FEATURE (16)..(20): Lactam ring between side chains at positions 16 and 20
  MOD_RES (29)..(29): C-terminal amidation
XSEGTFTSDYSKYLDERRAKDFVQWLMNT

SEQ ID NO: 158 - protein, 29 aa, Artificial Sequence
  glucagon analog
  MOD_RES (1)..(1): (Des-amino)His
  MISC_FEATURE (12)..(16): Lactam ring between side chains at positions 12 and 16
  MOD_RES (29)..(29): C-terminal amidation
XSEGTFTSDYSKYLDERRAQDFVQWLMNT

SEQ ID NO: 159 - protein, 29 aa, Artificial Sequence
  glucagon analog
  MOD_RES (1)..(1): (Des-amino)His
  MISC_FEATURE (12)..(16): Lactam ring between side chains at positions 12 and 16
  MOD_RES (29)..(29): C-terminal amidation
XSEGTFTSDYSKYLDERRAKDFVQWLMNT

SEQ ID NO: 160 - protein, 29 aa, Artificial Sequence
  glucagon analog
  MOD_RES (1)..(1): (Des-amino)His
  MISC_FEATURE (16)..(20): Lactam ring between side chains at positions 16 and 20
  MOD_RES (29)..(29): C-terminal amidation
XSEGTFTSDYSKYLDKRRAEDFVQWLMNT

SEQ ID NO: 161 - protein, 29 aa, Artificial Sequence
  glucagon analog
  MOD_RES (1)..(1): (Des-amino)His
  MOD_RES (29)..(29): C-terminal amidation
XSEGTFTSDYSKYLDERAAKDFVQWLMNT

SEQ ID NO: 162 - protein, 29 aa, Artificial Sequence
  glucagon analog
  MOD_RES (1)..(1): (Des-amino)His
  MISC_FEATURE (16)..(20): Lactam ring between side chains at positions 16 and 20
  MOD_RES (29)..(29): C-terminal amidation
XSEGTFTSDYSKYLDERAAKDFVQWLMNT

SEQ ID NO: 163 - protein, 29 aa, Artificial Sequence
  glucagon analog
  MOD_RES (1)..(1): (Des-amino)His
  MISC_FEATURE (12)..(16): Lactam ring between side chains at positions 12 and 16
  MOD_RES (29)..(29): C-terminal amidation
XSEGTFTSDYSKYLDERAAQDFVQWLMNT

SEQ ID NO: 164 - protein, 29 aa, Artificial Sequence
  glucagon analog
  MOD_RES (1)..(1): (Des-amino)His
  MISC_FEATURE (12)..(16): Lactam ring between side chains at positions 12 and 16
  MOD_RES (29)..(29): C-terminal amidation
XSEGTFTSDYSKYLDERAAKDFVQWLMNT

SEQ ID NO: 165 - protein, 29 aa, Artificial Sequence
  glucagon analog
  MOD_RES (1)..(1): (Des-amino)His
  MISC_FEATURE (16)..(20): Lactam ring between side chains at positions 16 and 20
  MOD_RES (29)..(29): C-terminal amidation
XSEGTFTSDYSKYLDKRAAEDFVQWLMNT

SEQ ID NO: 166 - protein, 29 aa, Artificial Sequence
  glucagon analog
  MOD_RES (1)..(1): (Des-amino)His
  MOD_RES (29)..(29): C-terminal amidation
XSEGTFTSDYSKYLDEQAAKEFIAWLMNT

SEQ ID NO: 167 - protein, 29 aa, Artificial Sequence
  glucagon analog
  MOD_RES (1)..(1): (Des-amino)His
  MISC_FEATURE (12)..(16): Lactam ring between side chains at positions 12 and 16
  MOD_RES (29)..(29): C-terminal amidation
XSEGTFTSDYSKYLDEQAAKEFIAWLMNT

SEQ ID NO: 168 - protein, 29 aa, Artificial Sequence
  glucagon analog
  MOD_RES (1)..(1): (Des-amino)His
  MISC_FEATURE (16)..(20): Lactam ring between side chains at positions 16 and 20
  MOD_RES (29)..(29): C-terminal amidation
XSEGTFTSDYSKYLDEQAAKEFIAWLMNT

SEQ ID NO: 169 - protein, 29 aa, Artificial Sequence
  glucagon analog
  MOD_RES (1)..(1): (Des-amino)His
  MOD_RES (29)..(29): C-terminal amidation
XSEGTFTSDYSKYLDEQAAKEFIAWLVKG

SEQ ID NO: 170 - protein, 29 aa, Artificial Sequence
  glucagon analog
  MOD_RES (1)..(1): (Des-amino)His
  MISC_FEATURE (12)..(16): Lactam ring between side chains at positions 12 and 16
  MOD_RES (29)..(29): C-terminal amidation
XSEGTFTSDYSKYLDEQAAKEFIAWLVKG

SEQ ID NO: 171 - protein, 29 aa, Artificial Sequence
  glucagon analog
  MOD_RES (1)..(1): (Des-amino)His
  MISC_FEATURE (16)..(20): Lactam ring between side chains at positions 16 and 20
  MOD_RES (29)..(29): C-terminal amidation
XSEGTFTSDYSKYLDEQAAKEFIAWLVKG

SEQ ID NO: 172 - protein, 29 aa, Artificial Sequence
  glucagon analog
  MOD_RES (2)..(2): Xaa is AIB
  MOD_RES (29)..(29): C-terminal amidation
HXEGTFTSDYSKYLDERRAQDFVQWLMNT

SEQ ID NO: 173 - protein, 29 aa, Artificial Sequence
  glucagon analog
  MOD_RES (2)..(2): Xaa is AIB
  MOD_RES (29)..(29): C-terminal amidation
HXEGTFTSDYSKYLDERRAKDFVQWLMNT

SEQ ID NO: 174 - protein, 29 aa, Artificial Sequence
  glucagon analog
  MOD_RES (2)..(2): Xaa is AIB
  MISC_FEATURE (16)..(20): Lactam ring between side chains at positions 16 and 20
  MOD_RES (29)..(29): C-terminal amidation
HXEGTFTSDYSKYLDERRAKDFVQWLMNT

SEQ ID NO: 175 - protein, 29 aa, Artificial Sequence
  glucagon analog
  MOD_RES (2)..(2): Xaa is AIB
  MISC_FEATURE (12)..(16): Lactam ring between side chains at positions 12 and 16
  MOD_RES (29)..(29): C-terminal amidation
HXEGTFTSDYSKYLDERRAQDFVQWLMNT

SEQ ID NO: 176 - protein, 29 aa, Artificial Sequence
  glucagon analog
  MOD_RES (2)..(2): Xaa is AIB
  MISC_FEATURE (12)..(16): Lactam ring between side chains at positions 12 and 16
  MOD_RES (29)..(29): C-terminal amidation
HXEGTFTSDYSKYLDERRAKDFVQWLMNT

SEQ ID NO: 177 - protein, 29 aa, Artificial Sequence
  glucagon analog
  MOD_RES (2)..(2): Xaa is AIB
  MISC_FEATURE (16)..(20): Lactam ring between side chains at positions 16 and 20
  MOD_RES (29)..(29): C-terminal amidation
HXEGTFTSDYSKYLDKRRAEDFVQWLMNT

SEQ ID NO: 178 - protein, 29 aa, Artificial Sequence
  glucagon analog
  MOD_RES (2)..(2): Xaa is AIB
  MOD_RES (29)..(29): C-terminal amidation
HXEGTFTSDYSKYLDERAAKDFVQWLMNT

SEQ ID NO: 179 - protein, 29 aa, Artificial Sequence
  glucagon analog
  MOD_RES (2)..(2): Xaa is AIB
  MISC_FEATURE (16)..(20): Lactam ring between side chains at positions 16 and 20
  MOD_RES (29)..(29): C-terminal amidation
HXEGTFTSDYSKYLDERAAKDFVQWLMNT

SEQ ID NO: 180 - protein, 29 aa, Artificial Sequence
  glucagon analog
  MOD_RES (2)..(2): Xaa is AIB
  MISC_FEATURE (12)..(16): Lactam ring between side chains at positions 12 and 16
  MOD_RES (29)..(29): C-terminal amidation
HXEGTFTSDYSKYLDERAAQDFVQWLMNT

SEQ ID NO: 181 - protein, 29 aa, Artificial Sequence
  glucagon analog
  MOD_RES (2)..(2): Xaa is AIB
  MISC_FEATURE (12)..(16): Lactam ring between side chains at positions 12 and 16
  MOD_RES (29)..(29): C-terminal amidation
HXEGTFTSDYSKYLDERAAKDFVQWLMNT

SEQ ID NO: 182 - protein, 29 aa, Artificial Sequence
  glucagon analog
  MOD_RES (2)..(2): Xaa is AIB
  MISC_FEATURE (16)..(20): Lactam ring between side chains at positions 16 and 20
  MOD_RES (29)..(29): C-terminal amidation
HXEGTFTSDYSKYLDKRAAEDFVQWLMNT

SEQ ID NO: 183 - protein, 29 aa, Artificial Sequence
  glucagon analog
  MOD_RES (2)..(2): Xaa is AIB
  MOD_RES (29)..(29): C-terminal amidation
HXEGTFTSDYSKYLDEQAAKEFIAWLMNT

SEQ ID NO: 184 - protein, 29 aa, Artificial Sequence
  glucagon analog
  MOD_RES (2)..(2): Xaa is AIB
  MISC_FEATURE (12)..(16): Lactam ring between side chains at positions 12 and 16
  MOD_RES (29)..(29): C-terminal amidation
HXEGTFTSDYSKYLDEQAAKEFIAWLMNT

SEQ ID NO: 185 - protein, 29 aa, Artificial Sequence
  glucagon analog
  MOD_RES (2)..(2): Xaa is AIB
  MISC_FEATURE (16)..(20): Lactam ring between side chains at positions 16 and 20
  MOD_RES (29)..(29): C-terminal amidation
HXEGTFTSDYSKYLDEQAAKEFIAWLMNT

SEQ ID NO: 186 - protein, 29 aa, Artificial Sequence
  glucagon analog
  MOD_RES (2)..(2): Xaa is AIB
  MOD_RES (29)..(29): C-terminal amidation
HXEGTFTSDYSKYLDEQAAKEFIAWLVKG

SEQ ID NO: 187 - protein, 29 aa, Artificial Sequence
  glucagon analog
  MOD_RES (2)..(2): Xaa is AIB
  MISC_FEATURE (12)..(16): Lactam ring between side chains at positions 12 and 16
  MOD_RES (29)..(29): C-terminal amidation
HXEGTFTSDYSKYLDEQAAKEFIAWLVKG

SEQ ID NO: 188 - protein, 29 aa, Artificial Sequence
  glucagon analog
  MOD_RES (2)..(2): Xaa is AIB
  MISC_FEATURE (16)..(20): Lactam ring between side chains at positions 16 and 20
  MOD_RES (29)..(29): C-terminal amidation
HXEGTFTSDYSKYLDEQAAKEFIAWLVKG

SEQ ID NO: 189 - protein, 29 aa, Artificial Sequence
  glucagon analog
  MOD_RES (2)..(2): Xaa is D-Ala
  MOD_RES (29)..(29): C-terminal amidation
HXEGTFTSDYSKYLDERRAQDFVQWLMNT

SEQ ID NO: 190 - protein, 29 aa, Artificial Sequence
  glucagon analog
  MOD_RES (2)..(2): Xaa is D-Ala
  MOD_RES (29)..(29): C-terminal amidation
HXEGTFTSDYSKYLDERRAKDFVQWLMNT

SEQ ID NO: 191 - protein, 29 aa, Artificial Sequence
  glucagon analog
  MOD_RES (2)..(2): Xaa is D-Ala
  MISC_FEATURE (16)..(20): Lactam ring between side chains at positions 16 and 20
  MOD_RES (29)..(29): C-terminal amidation
HXEGTFTSDYSKYLDERRAKDFVQWLMNT

SEQ ID NO: 192 - protein, 29 aa, Artificial Sequence
  glucagon analog
  MOD_RES (2)..(2): Xaa is D-Ala
  MISC_FEATURE (12)..(16): Lactam ring between side chains at positions 12 and 16
  MOD_RES (29)..(29): C-terminal amidation
HXEGTFTSDYSKYLDERRAQDFVQWLMNT

SEQ ID NO: 193 - protein, 29 aa, Artificial Sequence
  glucagon analog
  MOD_RES (2)..(2): Xaa is D-Ala
  MISC_FEATURE (12)..(16): Lactam ring between side chains at positions 12 and 16
  MOD_RES (29)..(29): C-terminal amidation
HXEGTFTSDYSKYLDERRAKDFVQWLMNT

SEQ ID NO: 194 - protein, 29 aa, Artificial Sequence
  glucagon analog
  MOD_RES (2)..(2): Xaa is D-Ala
  MISC_FEATURE (16)..(20): Lactam ring between side chains at positions 16 and 20
  MOD_RES (29)..(29): C-terminal amidation
HXEGTFTSDYSKYLDKRRAEDFVQWLMNT

SEQ ID NO: 195 - protein, 29 aa, Artificial Sequence
  glucagon analog
  MOD_RES (2)..(2): Xaa is D-Ala
  MISC_FEATURE (16)..(20): Lactam ring between side chains at positions 16 and 20
  MOD_RES (29)..(29): C-terminal amidation
HXEGTFTSDYSKYLDERAAKDFVQWLMNT

SEQ ID NO: 196 - protein, 29 aa, Artificial Sequence
  glucagon analog
  MOD_RES (2)..(2): Xaa is D-Ala
  MISC_FEATURE (16)..(20): Lactam ring between side chains at positions 16 and 20
  MOD_RES (29)..(29): C-terminal amidation
HXEGTFTSDYSKYLDERAAKDFVQWLMNT

SEQ ID NO: 197 - protein, 29 aa, Artificial Sequence
  glucagon analog
  MOD_RES (2)..(2): Xaa is D-Ala
  MISC_FEATURE (12)..(16): Lactam ring between side chains at positions 12 and 16
  MOD_RES (29)..(29): C-terminal amidation
HXEGTFTSDYSKYLDERAAQDFVQWLMNT

SEQ ID NO: 198 - protein, 29 aa, Artificial Sequence
  glucagon analog
  MOD_RES (2)..(2): Xaa is D-Ala
  MISC_FEATURE (12)..(16): Lactam ring between side chains at positions 12 and 16
  MOD_RES (29)..(29): C-terminal amidation
HXEGTFTSDYSKYLDERAAKDFVQWLMNT

SEQ ID NO: 199 - protein, 29 aa, Artificial Sequence
  glucagon analog
  MOD_RES (2)..(2): Xaa is D-Ala
  MISC_FEATURE (16)..(20): Lactam ring between side chains at positions 16 and 20
  MOD_RES (29)..(29): C-terminal amidation
HXEGTFTSDYSKYLDKRAAEDFVQWLMNT

SEQ ID NO: 200 - protein, 29 aa, Artificial Sequence
  glucagon analog
  MOD_RES (2)..(2): Xaa is D-Ala
  MOD_RES (29)..(29): C-terminal amidation
HXEGTFTSDYSKYLDEQAAKEFIAWLMNT

SEQ ID NO: 201 - protein, 29 aa, Artificial Sequence
  glucagon analog
  MOD_RES (2)..(2): Xaa is D-Ala
  MISC_FEATURE (12)..(16): Lactam ring between side chains at positions 12 and 16
  MOD_RES (29)..(29): C-terminal amidation
HXEGTFTSDYSKYLDEQAAKEFIAWLMNT

SEQ ID NO: 202 - protein, 29 aa, Artificial Sequence
  glucagon analog
  MOD_RES (2)..(2): Xaa is D-Ala
  MISC_FEATURE (16)..(20): Lactam ring between side chains at positions 16 and 20
  MOD_RES (29)..(29): C-terminal amidation
HXEGTFTSDYSKYLDEQAAKEFIAWLMNT

SEQ ID NO: 203 - protein, 29 aa, Artificial Sequence
  glucagon analog
  MOD_RES (2)..(2): Xaa is D-Ala
  MOD_RES (29)..(29): C-terminal amidation
HXEGTFTSDYSKYLDEQAAKEFIAWLVKG

SEQ ID NO: 204 - protein, 29 aa, Artificial Sequence
  glucagon analog
  MOD_RES (2)..(2): Xaa is D-Ala
  MISC_FEATURE (12)..(16): Lactam ring between side chains at positions 12 and 16
  MOD_RES (29)..(29): C-terminal amidation
HXEGTFTSDYSKYLDEQAAKEFIAWLVKG

SEQ ID NO: 205 - protein, 29 aa, Artificial Sequence
  glucagon analog
  MOD_RES (2)..(2): Xaa is D-Ala
  MISC_FEATURE (16)..(20): Lactam ring between side chains at positions 16 and 20
  MOD_RES (29)..(29): Lactam ring between side chains at positions 16 and 20
HXEGTFTSDYSKYLDEQAAKEFIAWLVKG

SEQ ID NO: 206 - protein, 29 aa, Artificial Sequence
  glucagon analog
  MOD_RES (24)..(24): PEGYLATION
  MOD_RES (29)..(29): C-terminal amidation
HSQGTFTSDYSKYLDERRAQDFVCWLMNT

SEQ ID NO: 207 - protein, 29 aa, Artificial Sequence
  glucagon analog
  MOD_RES (24)..(24): PEGYLATION
  MOD_RES (29)..(29): C-terminal amidation
HSQGTFTSDYSKYLDERRAKDFVCWLMNT

SEQ ID NO: 208 - protein, 29 aa, Artificial Sequence
  glucagon analog
  MISC_FEATURE (16)..(20): Lactam ring between side chains at positions 16 and 20
  MOD_RES (24)..(24): PEGYLATION
  MOD_RES (29)..(29): C-terminal amidation
HSQGTFTSDYSKYLDERRAKDFVCWLMNT

SEQ ID NO: 209 - protein, 29 aa, Artificial Sequence
  glucagon analog
  MISC_FEATURE (12)..(16): Lactam ring between side chains at positions 12 and 16
  MOD_RES (24)..(24): PEGYLATION
  MOD_RES (29)..(29): C-terminal amidation
HSQGTFTSDYSKYLDERRAQDFVCWLMNT

SEQ ID NO: 210 - protein, 29 aa, Artificial Sequence
  glucagon analog
  MISC_FEATURE (12)..(16): Lactam ring between side chains at positions 12 and 16
  MOD_RES (24)..(24): PEGYLATION
  MOD_RES (29)..(29): C-terminal amidation
HSQGTFTSDYSKYLDERRAKDFVCWLMNT

SEQ ID NO: 211 - protein, 29 aa, Artificial Sequence
  glucagon analog
  MISC_FEATURE (16)..(20): Lactam ring between side chains at positions 16 and 20
  MOD_RES (24)..(24): PEGYLATION
  MOD_RES (29)..(29): C-terminal amidation
HSQGTFTSDYSKYLDKRRAEDFVCWLMNT

SEQ ID NO: 212 - protein, 29 aa, Artificial Sequence
  glucagon analog
  MISC_FEATURE (16)..(20): Lactam ring between side chains at positions 16 and 20
  MOD_RES (24)..(24): PEGYLATION
  MOD_RES (29)..(29): C-terminal amidation
HSQGTFTSDYSKYLDERAAKDFVCWLMNT

SEQ ID NO: 213 - protein, 29 aa, Artificial Sequence
  glucagon analog
  MISC_FEATURE (16)..(20): Lactam ring between side chains at positions 16 and 20
  MOD_RES (24)..(24): PEGYLATION
  MOD_RES (29)..(29): C-terminal amidation
HSQGTFTSDYSKYLDERAAKDFVCWLMNT

SEQ ID NO: 214 - protein, 29 aa, Artificial Sequence
  glucagon analog
  MISC_FEATURE (12)..(16): Lactam ring between side chains at positions 12 and 16
  MOD_RES (24)..(24): PEGYLATION
  MOD_RES (29)..(29): C-terminal amidation
HSQGTFTSDYSKYLDERAAQDFVCWLMNT

SEQ ID NO: 215 - protein, 29 aa, Artificial Sequence
  glucagon analog
  MISC_FEATURE (12)..(16): Lactam ring between side chains at positions 12 and 16
  MOD_RES (24)..(24): PEGYLATION
  MOD_RES (29)..(29): C-terminal amidation
HSQGTFTSDYSKYLDERAAKDFVCWLMNT

SEQ ID NO: 216 - protein, 29 aa, Artificial Sequence
  glucagon analog
  MISC_FEATURE (16)..(20): Lactam ring between side chains at positions 16 and 20
  MOD_RES (24)..(24): PEGYLATION
  MOD_RES (29)..(29): C-terminal amidation
HSQGTFTSDYSKYLDKRAAEDFVCWLMNT

SEQ ID NO: 217 - protein, 29 aa, Artificial Sequence
  glucagon analog
  MOD_RES (24)..(24): PEGYLATION
  MOD_RES (29)..(29): C-terminal amidation
HSQGTFTSDYSKYLDEQAAKEFICWLMNT

SEQ ID NO: 218 - protein, 29 aa, Artificial Sequence
  glucagon analog
  MISC_FEATURE (12)..(16): Lactam ring between side chains at positions 12 and 16
  MOD_RES (24)..(24): PEGYLATION
  MOD_RES (29)..(29): C-terminal amidation
HSQGTFTSDYSKYLDEQAAKEFICWLMNT

SEQ ID NO: 219 - protein, 29 aa, Artificial Sequence
  glucagon analog
  MISC_FEATURE (16)..(20): Lactam ring between side chains at positions 16 and 20
  MOD_RES (24)..(24): PEGYLATION
  MOD_RES (29)..(29): C-terminal amidation
HSQGTFTSDYSKYLDEQAAKEFICWLMNT

SEQ ID NO: 220 - protein, 29 aa, Artificial Sequence
  glucagon analog
  MOD_RES (24)..(24): PEGYLATION
  MOD_RES (29)..(29): C-terminal amidation
HSQGTFTSDYSKYLDEQAAKEFICWLVKG

SEQ ID NO: 221 - protein, 29 aa, Artificial Sequence
  glucagon analog
  MISC_FEATURE (12)..(16): Lactam ring between side chains at positions 12 and 16
  MOD_RES (24)..(24): PEGYLATION
  MOD_RES (29)..(29): C-terminal amidation
HSQGTFTSDYSKYLDEQAAKEFICWLVKG

SEQ ID NO: 222 - protein, 29 aa, Artificial Sequence
  glucagon analog
  MISC_FEATURE (16)..(20): Lactam ring between side chains at positions 16 and 20
  MOD_RES (24)..(24): PEGYLATION
  MOD_RES (29)..(29): C-terminal amidation
HSQGTFTSDYSKYLDEQAAKEFICWLVKG

SEQ ID NO: 223 - protein, 29 aa, Artificial Sequence
  glucagon analog
  MOD_RES (1)..(1): Xaa is (Des-amino)His
  MOD_RES (24)..(24): PEGYLATION
  MOD_RES (29)..(29): C-terminal amidation
XSQGTFTSDYSKYLDERRAQDFVCWLMNT

SEQ ID NO: 224 - protein, 29 aa, Artificial Sequence
  glucagon analog
  MOD_RES (1)..(1): Xaa is (Des-amino)His
  MOD_RES (24)..(24): PEGYLATION
  MOD_RES (29)..(29): C-terminal amidation
XSQGTFTSDYSKYLDERRAKDFVCWLMNT

SEQ ID NO: 225 - protein, 29 aa, Artificial Sequence
  glucagon analog
  MOD_RES (1)..(1): Xaa is (Des-amino)His
  MISC_FEATURE (16)..(20): Lactam ring between side chains at positions 16 and 20
  MOD_RES (24)..(24): PEGYLATION
  MOD_RES (29)..(29): C-terminal amidation
XSQGTFTSDYSKYLDERRAKDFVCWLMNT

SEQ ID NO: 226 - protein, 29 aa, Artificial Sequence
  glucagon analog
  MOD_RES (1)..(1): Xaa is (Des-amino)His
  MISC_FEATURE (12)..(16): Lactam ring between side chains at positions 12 and 16
  MOD_RES (24)..(24): PEGYLATION
  MOD_RES (29)..(29): C-terminal amidation
XSQGTFTSDYSKYLDERRAQDFVCWLMNT

SEQ ID NO: 227 - protein, 29 aa, Artificial Sequence
  glucagon analog
  MOD_RES (1)..(1): Xaa is (Des-amino)His
  MISC_FEATURE (12)..(16): Lactam ring between side chains at positions 12 and 16
  MOD_RES (24)..(24): PEGYLATION
  MOD_RES (29)..(29): C-terminal amidation
XSQGTFTSDYSKYLDERRAKDFVCWLMNT

SEQ ID NO: 228 - protein, 29 aa, Artificial Sequence
  glucagon analog
  MOD_RES (1)..(1): Xaa is (Des-amino)His
  MISC_FEATURE (16)..(20): Lactam ring between side chains at positions 16 and 20
  MOD_RES (24)..(24): PEGYLATION
  MOD_RES (29)..(29): C-terminal amidation
XSQGTFTSDYSKYLDKRRAEDFVCWLMNT

SEQ ID NO: 229 - protein, 29 aa, Artificial Sequence
  glucagon analog
  MOD_RES (1)..(1): Xaa is (Des-amino)His
  MOD_RES (24)..(24): PEGYLATION
  MOD_RES (29)..(29): C-terminal amidation
XSQGTFTSDYSKYLDERAAKDFVCWLMNT

SEQ ID NO: 230 - protein, 29 aa, Artificial Sequence
  glucagon analog
  MOD_RES (1)..(1): Xaa is (Des-amino)His
  MISC_FEATURE (16)..(20): Lactam ring between side chains at positions 16 and 20
  MOD_RES (24)..(24): PEGYLATION
  MOD_RES (29)..(29): C-terminal amidation
XSQGTFTSDYSKYLDERAAKDFVCWLMNT

SEQ ID NO: 231 - protein, 29 aa, Artificial Sequence
  glucagon analog
  MOD_RES (1)..(1): Xaa is (Des-amino)His
  MISC_FEATURE (12)..(16): Lactam ring between side chains at positions 12 and 16
  MOD_RES (24)..(24): PEGYLATION
  MOD_RES (29)..(29): C-terminal amidation
XSQGTFTSDYSKYLDERAAQDFVCWLMNT

SEQ ID NO: 232 - protein, 29 aa, Artificial Sequence
  glucagon analog
  MOD_RES (1)..(1): Xaa is (Des-amino)His
  MISC_FEATURE (12)..(16): Lactam ring between side chains at positions 12 and 16
  MOD_RES (24)..(24): PEGYLATION
  MOD_RES (29)..(29): C-terminal amidation
XSQGTFTSDYSKYLDERAAKDFVCWLMNT

SEQ ID NO: 233 - protein, 29 aa, Artificial Sequence
  glucagon analog
  MOD_RES (1)..(1): Xaa is (Des-amino)His
  MISC_FEATURE (16)..(20): Lactam ring between side chains at positions 16 and 20
  MOD_RES (24)..(24): PEGYLATION
  MOD_RES (29)..(29): C-terminal amidation
XSQGTFTSDYSKYLDKRAAEDFVCWLMNT

SEQ ID NO: 234 - protein, 29 aa, Artificial Sequence
  glucagon analog
  MOD_RES (1)..(1): Xaa is (Des-amino)His
  MOD_RES (24)..(24): PEGYLATION
  MOD_RES (29)..(29): C-terminal amidation
XSQGTFTSDYSKYLDEQAAKEFICWLMNT

SEQ ID NO: 235 - protein, 29 aa, Artificial Sequence
  glucagon analog
  MOD_RES (1)..(1): XAa is (Des-amino)His
  MISC_FEATURE (12)..(16): Lactam ring between side chains at positions 12 and 16
  MOD_RES (24)..(24): PEGYLATION
  MOD_RES (29)..(29): C-terminal amidation
XSQGTFTSDYSKYLDEQAAKEFICWLMNT

SEQ ID NO: 236 - protein, 29 aa, Artificial Sequence
  glucagon analog
  MOD_RES (1)..(1): Xaa is (Des-amino)His
  MISC_FEATURE (16)..(20): Lactam ring between side chains at positions 16 and 20
  MOD_RES (24)..(24): PEGYLATION
  MOD_RES (29)..(29): C-terminal amidation
XSQGTFTSDYSKYLDEQAAKEFICWLMNT

SEQ ID NO: 237 - protein, 29 aa, Artificial Sequence
  glucagon analog
  MOD_RES (1)..(1): Xaa is (Des-amino)His
  MOD_RES (24)..(24): PEGYLATION
  MOD_RES (29)..(29): C-terminal amidation
XSQGTFTSDYSKYLDEQAAKEFICWLVKG

SEQ ID NO: 238 - protein, 29 aa, Artificial Sequence
  glucagon analog
  MOD_RES (1)..(1): Xaa is (Des-amino)His
  MISC_FEATURE (12)..(16): Lactam ring between side chains at positions 12 and 16
  MOD_RES (24)..(24): PEGYLATION
  MOD_RES (29)..(29): C-terminal amidation
XSQGTFTSDYSKYLDEQAAKEFICWLVKG

SEQ ID NO: 239 - protein, 29 aa, Artificial Sequence
  glucagon analog
  MOD_RES (1)..(1): Xaa is (Des-amino)His
  MISC_FEATURE (16)..(20): Lactam ring between side chains at positions 16 and 20
  MOD_RES (24)..(24): PEGYLATION
  MOD_RES (29)..(29): C-terminal amidation
XSQGTFTSDYSKYLDEQAAKEFICWLVKG

SEQ ID NO: 240 - protein, 29 aa, Artificial Sequence
  Synthetic peptide
  MOD_RES (2)..(2): Xaa is AIB
  MOD_RES (24)..(24): PEGYLATION
  MOD_RES (29)..(29): C-terminal amidation
HXQGTFTSDYSKYLDERRAQDFVCWLMNT

SEQ ID NO: 241 - protein, 29 aa, Artificial Sequence
  Synthetic peptide
  MOD_RES (2)..(2): Xaa is AIB
  MOD_RES (24)..(24): PEGYLATION
  MOD_RES (29)..(29): C-terminal amidation
HXQGTFTSDYSKYLDERRAKDFVCWLMNT

SEQ ID NO: 242 - protein, 29 aa, Artificial Sequence
  Synthetic peptide
  MOD_RES (2)..(2): Xaa is AIB
  MISC_FEATURE (16)..(20): Lactam ring between side chains at positions 16 and 20
  MOD_RES (24)..(24): PEGYLATION
  MOD_RES (29)..(29): C-terminal amidation
HXQGTFTSDYSKYLDERRAKDFVCWLMNT

SEQ ID NO: 243 - protein, 29 aa, Artificial Sequence
  Synthetic peptide
  MOD_RES (2)..(2): Xaa is AIB
  MISC_FEATURE (12)..(16): Lactam ring between side chains at positions 12 and 16
  MOD_RES (24)..(24): PEGYLATION
  MOD_RES (29)..(29): C-terminal amidation
HXQGTFTSDYSKYLDERRAQDFVCWLMNT

SEQ ID NO: 244 - protein, 29 aa, Artificial Sequence
  Synthetic peptide
  MOD_RES (2)..(2): Xaa is AIB
  MISC_FEATURE (12)..(16): Lactam ring between side chains at positions 12 and 16
  MOD_RES (24)..(24): PEGYLATION
  MOD_RES (29)..(29): C-terminal amidation
HXQGTFTSDYSKYLDERRAKDFVCWLMNT

SEQ ID NO: 245 - protein, 29 aa, Artificial Sequence
  Synthetic peptide
  MOD_RES (2)..(2): Xaa is AIB
  MISC_FEATURE (16)..(20): Lactam ring side chains at positions 16 and 20
  MOD_RES (24)..(24): PEGYLATION
  MOD_RES (29)..(29): C-terminal amidation
HXQGTFTSDYSKYLDKRRAEDFVCWLMNT

SEQ ID NO: 246 - protein, 29 aa, Artificial Sequence
  Synthetic peptide
  MOD_RES (2)..(2): Xaa is AIB
  MOD_RES (24)..(24): PEGYLATION
  MOD_RES (29)..(29): C-terminal amidation
HXQGTFTSDYSKYLDERAAKDFVCWLMNT

SEQ ID NO: 247 - protein, 29 aa, Artificial Sequence
  Synthetic peptide
  MOD_RES (2)..(2): Xaa is AIB
  MISC_FEATURE (16)..(20): Lactam ring between side chains at positions 16 and 20
  MOD_RES (24)..(24): PEGYLATION
  MOD_RES (29)..(29): C-terminal amidation
HXQGTFTSDYSKYLDERAAKDFVCWLMNT

SEQ ID NO: 248 - protein, 29 aa, Artificial Sequence
  Synthetic peptide
  MOD_RES (2)..(2): Xaa is AIB
  MISC_FEATURE (12)..(16): Lactam ring between side chains at positions 12 and 16
  MOD_RES (24)..(24): PEGYLATION
  MOD_RES (29)..(29): C-terminal amidation
HXQGTFTSDYSKYLDERAAQDFVCWLMNT

SEQ ID NO: 249 - protein, 29 aa, Artificial Sequence
  Synthetic peptide
  MOD_RES (2)..(2): Xaa is AIB
  MISC_FEATURE (12)..(16): Lactam ring between side chains at positions 12 and 16
  MOD_RES (24)..(24): PEGYLATION
  MOD_RES (29)..(29): C-terminal amidation
HXQGTFTSDYSKYLDERAAKDFVCWLMNT

SEQ ID NO: 250 - protein, 29 aa, Artificial Sequence
  Synthetic peptide
  MOD_RES (2)..(2): Xaa is AIB
  MISC_FEATURE (12)..(16): Lactam ring between side chains at positions 12 and 16
  MOD_RES (24)..(24): PEGYLATION
  MOD_RES (29)..(29): C-terminal amidation
HXQGTFTSDYSKYLDKRAAEDFVCWLMNT

SEQ ID NO: 251 - protein, 29 aa, Artificial Sequence
  Synthetic peptide
  MOD_RES (2)..(2): Xaa is AIB
  MOD_RES (24)..(24): PEGYLATION
  MOD_RES (29)..(29): C-terminal amidation
HXQGTFTSDYSKYLDEQAAKEFICWLMNT

SEQ ID NO: 252 - protein, 29 aa, Artificial Sequence
  Synthetic peptide
  misc_feature (2)..(2): Xaa can be any naturally occurring amino acid
HXQGTFTSDYSKYLDEQAAKEFICWLMNT

SEQ ID NO: 253 - protein, 29 aa, Artificial Sequence
  Synthetic peptide
  MOD_RES (2)..(2): Xaa is AIB
  MISC_FEATURE (16)..(20): Lactam ring between side chains at positions 16 and 20
  MOD_RES (24)..(24): PEGYLATION
  MOD_RES (29)..(29): C-terminal amidation
HXQGTFTSDYSKYLDEQAAKEFICWLMNT

SEQ ID NO: 254 - protein, 29 aa, Artificial Sequence
  Synthetic peptide
  MOD_RES (2)..(2): Xaa is AIB
  MOD_RES (24)..(24): PEGYLATION
  MOD_RES (29)..(29): C-terminal amidation
HXQGTFTSDYSKYLDEQAAKEFICWLVKG

SEQ ID NO: 255 - protein, 29 aa, Artificial Sequence
  Synthetic peptide
  MOD_RES (2)..(2): Xaa is AIB
  MISC_FEATURE (12)..(16): Lactam ring between side chains at positions 12 and 16
  MOD_RES (24)..(24): PEGYLATION
  MOD_RES (29)..(29): C-terminal amidation
HXQGTFTSDYSKYLDEQAAKEFICWLVKG

SEQ ID NO: 256 - protein, 29 aa, Artificial Sequence
  Synthetic peptide
  MOD_RES (2)..(2): Xaa is AIB
  MISC_FEATURE (16)..(20): Lactam ring between side chains at positions 16 and 20
  MOD_RES (24)..(24): PEGYLATION
  MOD_RES (29)..(29): C-terminal amidation
HXQGTFTSDYSKYLDEQAAKEFICWLVKG

SEQ ID NO: 257 - protein, 29 aa, Artificial Sequence
  Synthetic peptide
  MOD_RES (2)..(2): Xaa is D-Ala
  MOD_RES (24)..(24): PEGYLATION
  MOD_RES (29)..(29): C-terminal amidation
HXQGTFTSDYSKYLDERRAQDFVCWLMNT

SEQ ID NO: 258 - protein, 29 aa, Artificial Sequence
  Synthetic peptide
  MOD_RES (2)..(2): Xaa is D-Ala
  MOD_RES (24)..(24): PEGYLATION
  MOD_RES (29)..(29): C-terminal amidation
HXQGTFTSDYSKYLDERRAKDFVCWLMNT

SEQ ID NO: 259 - protein, 29 aa, Artificial Sequence
  Synthetic peptide
  MOD_RES (2)..(2): Xaa is D-Ala
  MISC_FEATURE (16)..(20): Lactam ring between side chains at positions 16 and 20
  MOD_RES (24)..(24): PEGYLATION
  MOD_RES (29)..(29): C-terminal amidation
HXQGTFTSDYSKYLDERRAKDFVCWLMNT

SEQ ID NO: 260 - protein, 29 aa, Artificial Sequence
  Synthetic peptide
  MOD_RES (2)..(2): Xaa is D-Ala
  MISC_FEATURE (12)..(16): Lactam ring between side chrains at positions 12 and 16
  MOD_RES (24)..(24): PEGYLATION
  MOD_RES (29)..(29): C-terminal amidation
HXQGTFTSDYSKYLDERRAQDFVCWLMNT

SEQ ID NO: 261 - protein, 29 aa, Artificial Sequence
  Synthetic peptide
  MOD_RES (2)..(2): Xaa is D-Ala
  MISC_FEATURE (12)..(16): Lactam ring between side chains at positions 12 and 16
  MOD_RES (24)..(24): PEGYLATION
  MOD_RES (29)..(29): C-terminal amidation
HXQGTFTSDYSKYLDERRAKDFVCWLMNT

SEQ ID NO: 262 - protein, 29 aa, Artificial Sequence
  Synthetic peptide
  MOD_RES (2)..(2): Xaa is D-Ala
  MISC_FEATURE (16)..(20): Lactam ring between side chains at positions 16 and 20
  MOD_RES (24)..(24): PEGYLATION
  MOD_RES (29)..(29): C-terminal amidation
HXQGTFTSDYSKYLDKRRAEDFVCWLMNT

SEQ ID NO: 263 - protein, 29 aa, Artificial Sequence
  Synthetic peptide
  MOD_RES (2)..(2): Xaa is D-Ala
  MOD_RES (24)..(24): PEGYLATION
  MOD_RES (29)..(29): C-terminal amidation
HXQGTFTSDYSKYLDERAAKDFVCWLMNT

SEQ ID NO: 264 - protein, 29 aa, Artificial Sequence
  Synthetic peptide
  MOD_RES (2)..(2): Xaa is D-Ala
  MISC_FEATURE (16)..(20): Lactam ring between side chains at positions 16 and 20
  MOD_RES (24)..(24): PEGYLATION
  MOD_RES (29)..(29): C-terminal amidation
HXQGTFTSDYSKYLDERAAKDFVCWLMNT

SEQ ID NO: 265 - protein, 29 aa, Artificial Sequence
  Synthetic peptide
  MOD_RES (2)..(2): Xaa is D-Ala
  MISC_FEATURE (12)..(16): Lactam ring between side chains at positions 12 and 16
  MOD_RES (24)..(24): PEGYLATION
  MOD_RES (29)..(29): C-terminal amidation
HXQGTFTSDYSKYLDERAAQDFVCWLMNT

SEQ ID NO: 266 - protein, 29 aa, Artificial Sequence
  Synthetic peptide
  MOD_RES (2)..(2): Xaa is D-Ala
  MISC_FEATURE (12)..(16): Lactam ring betwee side chains at positions 12 and 16
  MOD_RES (24)..(24): PEGYLATION
  MOD_RES (29)..(29): C-terminal amidation
HXQGTFTSDYSKYLDERAAKDFVCWLMNT

SEQ ID NO: 267 - protein, 29 aa, Artificial Sequence
  Synthetic peptide
  MOD_RES (2)..(2): Xaa is D-Ala
  MISC_FEATURE (16)..(20): Lactam ring between side chains at positions 16 and 20
  MOD_RES (24)..(24): PEGYLATION
  MOD_RES (29)..(29): C-terminal amidation
HXQGTFTSDYSKYLDKRAAEDFVCWLMNT

SEQ ID NO: 268 - protein, 29 aa, Artificial Sequence
  Synthetic peptide
  MOD_RES (2)..(2): Xaa is D-Ala
  MOD_RES (24)..(24): PEGYLATION
  MOD_RES (29)..(29): C-terminal amidation
HXQGTFTSDYSKYLDEQAAKEFICWLMNT

SEQ ID NO: 269 - protein, 29 aa, Artificial Sequence
  Synthetic peptide
  MOD_RES (2)..(2): Xaa is D-Ala
  MISC_FEATURE (12)..(16): Lactam ring betwee side chains at positions 12 and 16
  MOD_RES (24)..(24): PEGYLATION
  MOD_RES (29)..(29): C-terminal amidation
HXQGTFTSDYSKYLDEQAAKEFICWLMNT

SEQ ID NO: 270 - protein, 29 aa, Artificial Sequence
  Synthetic peptide
  MOD_RES (2)..(2): Xaa is D-Ala
  MISC_FEATURE (16)..(20): Lactam ring betwee side chains at positions 16 and 20
  MOD_RES (24)..(24): PEGYLATION
  MOD_RES (29)..(29): C-terminal amidation
HXQGTFTSDYSKYLDEQAAKEFICWLMNT

SEQ ID NO: 271 - protein, 29 aa, Artificial Sequence
  Synthetic peptide
  MOD_RES (2)..(2): Xaa is D-Ala
  MOD_RES (24)..(24): PEGYLATION
  MOD_RES (29)..(29): C-terminal amidation
HXQGTFTSDYSKYLDEQAAKEFICWLVKG

SEQ ID NO: 272 - protein, 29 aa, Artificial Sequence
  Synthetic peptide
  MOD_RES (2)..(2): Xaa is D-Ala
  MISC_FEATURE (12)..(16): Lactam ring between side chains at positions 12 and 16
  MOD_RES (24)..(24): PEGYLATION
  MOD_RES (29)..(29): C-terminal midation
HXQGTFTSDYSKYLDEQAAKEFICWLVKG

SEQ ID NO: 273 - protein, 29 aa, Artificial Sequence
  Synthetic peptide
  MOD_RES (2)..(2): Xaa is D-Ala
  MISC_FEATURE (16)..(20): Lactam ring between side chains at positions 16 and 20
  MOD_RES (24)..(24): PEGYLATION
  MOD_RES (29)..(29): C-terminal amidation
HXQGTFTSDYSKYLDEQAAKEFICWLVKG

SEQ ID NO: 274 - protein, 29 aa, Artificial Sequence
  Synthetic peptide
  MOD_RES (24)..(24): PEGYLATION
  MOD_RES (29)..(29): C-terminal amidation
HSEGTFTSDYSKYLDERRAQDFVCWLMNT

SEQ ID NO: 275 - protein, 29 aa, Artificial Sequence
  Synthetic peptide
  MOD_RES (24)..(24): PEGYLATION
  MOD_RES (29)..(29): C-terminal amidation
HSEGTFTSDYSKYLDERRAKDFVCWLMNT

SEQ ID NO: 276 - protein, 29 aa, Artificial Sequence
  Synthetic peptide
  MISC_FEATURE (16)..(20): Lactam ring between side chains at positions 16 and 20
  MOD_RES (24)..(24): PEGYLATION
  MOD_RES (29)..(29): C-terminal amidation
HSEGTFTSDYSKYLDERRAKDFVCWLMNT

SEQ ID NO: 277 - protein, 29 aa, Artificial Sequence
  Synthetic peptide
  MISC_FEATURE (12)..(16): Lactam ring between side chains at positions 12 and 16
  MOD_RES (24)..(24): PEGYLATION
  MOD_RES (29)..(29): C-terminal amidation
HSEGTFTSDYSKYLDERRAQDFVCWLMNT

SEQ ID NO: 278 - protein, 29 aa, Artificial Sequence
  Synthetic peptide
  MISC_FEATURE (12)..(16): Lactam ring between side chains at positions 12 and 16
  MOD_RES (24)..(24): PEGYLATION
  MOD_RES (29)..(29): C-terminal amidation
HSEGTFTSDYSKYLDERRAKDFVCWLMNT

SEQ ID NO: 279 - protein, 29 aa, Artificial Sequence
  Synthetic peptide
  MISC_FEATURE (16)..(20): Lactam ring between side chains at positions 16 and 20
  MOD_RES (24)..(24): PEGYLATION
  MOD_RES (29)..(29): C-terminal amidation
HSEGTFTSDYSKYLDKRRAEDFVCWLMNT

SEQ ID NO: 280 - protein, 29 aa, Artificial Sequence
  Synthetic peptide
  MOD_RES (24)..(24): PEGYLATION
  MOD_RES (29)..(29): C-terminal amidation
HSEGTFTSDYSKYLDERAAKDFVCWLMNT

SEQ ID NO: 281 - protein, 29 aa, Artificial Sequence
  Synthetic peptide
  MISC_FEATURE (16)..(20): Lactam ring between side chains at positions 16 and 20
  MOD_RES (24)..(24): PEGYLATION
  MOD_RES (29)..(29): C-terminal amidation
HSEGTFTSDYSKYLDERAAKDFVCWLMNT

SEQ ID NO: 282 - protein, 29 aa, Artificial Sequence
  Synthetic peptide
  MISC_FEATURE (12)..(16): Lactam ring between side chains at positions 12 and 16
  MOD_RES (24)..(24): PEGYLATION
  MOD_RES (29)..(29): C-terminal amidation
HSEGTFTSDYSKYLDERAAQDFVCWLMNT

SEQ ID NO: 283 - protein, 29 aa, Artificial Sequence
  Synthetic peptide
  MISC_FEATURE (12)..(16): Lactam ring between side chains at positions 12 and 16
  MOD_RES (24)..(24): PEGYLATION
  MOD_RES (29)..(29): C-terminal amidation
HSEGTFTSDYSKYLDERAAKDFVCWLMNT

SEQ ID NO: 284 - protein, 29 aa, Artificial Sequence
  Synthetic peptide
  MISC_FEATURE (16)..(20): Lactam ring between side chains at positions 16 and 20
  MOD_RES (24)..(24): PEGYLATION
  MOD_RES (29)..(29): C-terminal amidation
HSEGTFTSDYSKYLDKRAAEDFVCWLMNT

SEQ ID NO: 285 - protein, 29 aa, Artificial Sequence
  Synthetic peptide
  MOD_RES (24)..(24): PEGYLATION
  MOD_RES (29)..(29): C-terminal amidation
HSEGTFTSDYSKYLDEQAAKEFICWLMNT

SEQ ID NO: 286 - protein, 29 aa, Artificial Sequence
  Synthetic peptide
  MISC_FEATURE (12)..(16): Lactam ring between side chains at positions 12 and 16
  MOD_RES (24)..(24): PEGYLATION
  MOD_RES (29)..(29): C-terminal amidation
HSEGTFTSDYSKYLDEQAAKEFICWLMNT

SEQ ID NO: 287 - protein, 29 aa, Artificial Sequence
  Synthetic peptide
  MISC_FEATURE (16)..(20): Lactam ring between side chain at positions 16 and 20
  MOD_RES (24)..(24): PEGYLATION
  MOD_RES (29)..(29): C-terminal amidation
HSEGTFTSDYSKYLDEQAAKEFICWLMNT

SEQ ID NO: 288 - protein, 29 aa, Artificial Sequence
  Synthetic peptide
  MOD_RES (24)..(24): PEGYLATION
  MOD_RES (29)..(29): C-terminal amidation
HSEGTFTSDYSKYLDEQAAKEFICWLVKG

SEQ ID NO: 289 - protein, 29 aa, Artificial Sequence
  Synthetic peptide
  MISC_FEATURE (12)..(16): Lactam ring between side chains at positions 12 and 16
  MOD_RES (24)..(24): PEGYLATION
  MOD_RES (29)..(29): C-terminal amidation
HSEGTFTSDYSKYLDEQAAKEFICWLVKG

SEQ ID NO: 290 - protein, 29 aa, Artificial Sequence
  Synthetic peptide
  MISC_FEATURE (16)..(20): Lactam ring between side chains at positions 16 and 20
  MOD_RES (24)..(24): PEGYLATION
  MOD_RES (29)..(29): C-terminal amidation
HSEGTFTSDYSKYLDEQAAKEFICWLVKG

SEQ ID NO: 291 - protein, 29 aa, Artificial Sequence
  Synthetic peptide
  MOD_RES (1)..(1): Xaa is (Des-amino)His
  MOD_RES (24)..(24): PEGYLATION
  MOD_RES (29)..(29): C-terminal amidation
XSEGTFTSDYSKYLDERRAQDFVCWLMNT

SEQ ID NO: 292 - protein, 29 aa, Artificial Sequence
  Synthetic peptide
  MOD_RES (1)..(1): Xaa is (Des-amino)His
  MOD_RES (24)..(24): PEGYLATION
  MOD_RES (29)..(29): C-terminal amidation
XSEGTFTSDYSKYLDERRAKDFVCWLMNT

SEQ ID NO: 293 - protein, 29 aa, Artificial Sequence
  Synthetic peptide
  MOD_RES (1)..(1): Xaa is (Des-amino)His
  MISC_FEATURE (16)..(20): Lactam ring between side chains at positions 16 and 20
  MOD_RES (24)..(24): PEGYLATION
  MOD_RES (29)..(29): C-terminal amidation
XSEGTFTSDYSKYLDERRAKDFVCWLMNT

SEQ ID NO: 294 - protein, 29 aa, Artificial Sequence
  Synthetic peptide
  MOD_RES (1)..(1): Xaa is (Des-amino)His
  MISC_FEATURE (12)..(16): Lactam ring between side chains at positions 12 and 16
  MOD_RES (24)..(24): PEGYLATION
  MOD_RES (29)..(29): C-terminal amidation
XSEGTFTSDYSKYLDERRAQDFVCWLMNT

SEQ ID NO: 295 - protein, 29 aa, Artificial Sequence
  Synthetic peptide
  MOD_RES (1)..(1): Xaa is (Des-amino)His
  MISC_FEATURE (12)..(16): Lactam ring between side chains at positions 12 and 16
  MOD_RES (24)..(24): PEGYLATION
  MOD_RES (29)..(29): C-terminal amidation
XSEGTFTSDYSKYLDERRAKDFVCWLMNT

SEQ ID NO: 296 - protein, 29 aa, Artificial Sequence
  Synthetic peptide
  MOD_RES (1)..(1): Xaa is (Des-amino)His
  MISC_FEATURE (16)..(20): Lactam ring between side chains at positions 16 and 20
  MOD_RES (24)..(24): PEGYLATION
  MOD_RES (29)..(29): C-terminal amidation
XSEGTFTSDYSKYLDKRRAEDFVCWLMNT

SEQ ID NO: 297 - protein, 29 aa, Artificial Sequence
  Synthetic peptide
  MOD_RES (1)..(1): Xaa is (Des-amino)His
  MOD_RES (24)..(24): PEGYLATION
  MOD_RES (29)..(29): C-terminal amidation
XSEGTFTSDYSKYLDERAAKDFVCWLMNT

SEQ ID NO: 298 - protein, 29 aa, Artificial Sequence
  Synthetic peptide
  MOD_RES (1)..(1): Xaa is (Des-amino)His
  MISC_FEATURE (16)..(20): Lactam ring between side chains at positions 16 and 20
  MOD_RES (24)..(24): PEGYLATION
  MOD_RES (29)..(29): C-terminal amidation
XSEGTFTSDYSKYLDERAAKDFVCWLMNT

SEQ ID NO: 299 - protein, 29 aa, Artificial Sequence
  Synthetic peptide
  MOD_RES (1)..(1): Xaa is (Des-amino)His
  MISC_FEATURE (12)..(16): Lactam ring between side chains at positions 12 and 16
  MOD_RES (24)..(24): PEGYLATION
  MOD_RES (29)..(29): C-terminal amidation
XSEGTFTSDYSKYLDERAAQDFVCWLMNT

SEQ ID NO: 300 - protein, 29 aa, Artificial Sequence
  Synthetic peptide
  MOD_RES (1)..(1): Xaa is (Des-amino)His
  MISC_FEATURE (12)..(16): Lactam ring between side chains at positions 12 and 16
  MOD_RES (24)..(24): PEGYLATION
  MOD_RES (29)..(29): C-terminal amidation
XSEGTFTSDYSKYLDERAAKDFVCWLMNT

SEQ ID NO: 301 - protein, 29 aa, Artificial Sequence
  Synthetic peptide
  MISC_FEATURE: c-term amidation
  MOD_RES (1)..(1): (Des-amino)His
  MISC_FEATURE (16)..(20): Lactam ring between side chains at positions 16 and 20
  MOD_RES (24)..(24): Cys-PEG
XSEGTFTSDYSKYLDKRAAEDFVCWLMNT

SEQ ID NO: 302 - protein, 29 aa, Artificial Sequence
  Synthetic peptide
  MISC_FEATURE: c-term amidation
  MOD_RES (1)..(1): (Des-amino)His
  MOD_RES (24)..(24): Cys-PEG
XSEGTFTSDYSKYLDEQAAKGFICWLMNT

SEQ ID NO: 303 - protein, 29 aa, Artificial Sequence
  Synthetic peptide
  MISC_FEATURE: c-term amidation
  MOD_RES (1)..(1): (Des-amino)His
  MISC_FEATURE (12)..(16): Lactam ring between side chains at positions 12 and 16
  MOD_RES (24)..(24): Cys-PEG
XSEGTFTSDYSKYLDEQAAKGFICWLMNT

SEQ ID NO: 304 - protein, 29 aa, Artificial Sequence
  Synthetic peptide
  MISC_FEATURE: c-term amidation
  MOD_RES (1)..(1): (Des-amino)His
  MISC_FEATURE (16)..(20): Lactam ring between side chains at positions 16 and 20
  MOD_RES (24)..(24): Cys-PEG
XSEGTFTSDYSKYLDEQAAKGFICWLMNT

SEQ ID NO: 305 - protein, 29 aa, Artificial Sequence
  Synthetic peptide
  MISC_FEATURE: c-term amidation
  MOD_RES (1)..(1): (des-amino)His
  MOD_RES (24)..(24): Cys-PEG
XSEGTFTSDYSKYLDEQAAKGFICWLVKG

SEQ ID NO: 306 - protein, 29 aa, Artificial Sequence
  Synthetic peptide
  MISC_FEATURE: c-term amidation
  MOD_RES (1)..(1): (Des-amino)His
  MISC_FEATURE (12)..(16): Lactam ring between side chains at positions 12 and 16
  MOD_RES (24)..(24): Cys-PEG
XSEGTFTSDYSKYLDEQAAKGFICWLVKG

SEQ ID NO: 307 - protein, 29 aa, Artificial Sequence
  Synthetic peptide
  MISC_FEATURE: c-term amidation
  MOD_RES (1)..(1): (Des-amino)His
  MISC_FEATURE (16)..(20): Lactam ring between side chains at positions 16 and 20
  MOD_RES (24)..(24): Cys-PEG
XSEGTFTSDYSKYLDEQAAKGFICWLVKG

SEQ ID NO: 308 - protein, 29 aa, Artificial Sequence
  Synthetic peptide
  MISC_FEATURE: c-term amidation
  MOD_RES (2)..(2): Aminoisobutyric acid
  MOD_RES (24)..(24): Cys-PEG
HXEGTFTSDYSKYLDERRAQDFVCWLMNT

SEQ ID NO: 309 - protein, 29 aa, Artificial Sequence
  Synthetic peptide
  MISC_FEATURE: c-term amidation
  MOD_RES (2)..(2): Aminoisobutyric acid
  MOD_RES (24)..(24): Cys-PEG
HXEGTFTSDYSKYLDERRAKDFVCWLMNT

SEQ ID NO: 310 - protein, 29 aa, Artificial Sequence
  Synthetic peptide
  MISC_FEATURE: c-term amidation
  MOD_RES (2)..(2): Aminoisobutyric acid
  MISC_FEATURE (16)..(20): Lactam ring between side chains at positions 16 and 20
  MOD_RES (24)..(24): Cys-PEG
HXEGTFTSDYSKYLDERRAKDFVCWLMNT

SEQ ID NO: 311 - protein, 29 aa, Artificial Sequence
  Synthetic peptide
  MISC_FEATURE: c-term amidation
  MOD_RES (2)..(2): Aminoisobutyric acid
  MISC_FEATURE (12)..(16): Lactam ring between side chain at positions 12 and 16
  MOD_RES (24)..(24): Cys-PEG
HXEGTFTSDYSKYLDERRAQDFVCWLMNT

SEQ ID NO: 312 - protein, 29 aa, Artificial Sequence
  Synthetic peptide
  MISC_FEATURE: c-term amidation
  MOD_RES (2)..(2): Aminoisobutyric acid
  MISC_FEATURE (12)..(16): Lactam ring between side chains at positions 12 and 16
  MOD_RES (24)..(24): Cys-PEG
HXEGTFTSDYSKYLDERRAKDFVCWLMNT

SEQ ID NO: 313 - protein, 29 aa, Artificial Sequence
  Synthetic peptide
  MISC_FEATURE: c-term amidation
  MOD_RES (2)..(2): Aminoisobutyric acid
  MISC_FEATURE (16)..(20): Lactam ring between side chains at positions 16 and 20
  MOD_RES (24)..(24): Cys-PEG
HXEGTFTSDYSKYLDKRRAEDFVCWLMNT

SEQ ID NO: 314 - protein, 29 aa, Artificial Sequence
  Synthetic peptide
  MISC_FEATURE: c-term amidation
  MOD_RES (2)..(2): Aminoisobutyric acid
  MOD_RES (24)..(24): Cys-PEG
HXEGTFTSDYSKYLDERAAKDFVCWLMNT

SEQ ID NO: 315 - protein, 29 aa, Artificial Sequence
  Synthetic peptide
  MISC_FEATURE: c-term amidation
  MOD_RES (2)..(2): Aminoisobutyric acid
  MISC_FEATURE (16)..(20): Lactam ring between seide chains at positions 16 and 20
  MOD_RES (24)..(24): Cys-PEG
HXEGTFTSDYSKYLDERAAKDFVCWLMNT

SEQ ID NO: 316 - protein, 29 aa, Artificial Sequence
  Synthetic peptide
  MISC_FEATURE: c-term amidation
  MOD_RES (2)..(2): Aminoisobutyric acid
  MISC_FEATURE (12)..(16): Lactam ring between side chains at positions 12 and 16
  MOD_RES (24)..(24): Cys-PEG
HXEGTFTSDYSKYLDERAAQDFVCWLMNT

SEQ ID NO: 317 - protein, 29 aa, Artificial Sequence
  Synthetic peptide
  MISC_FEATURE: c-term amidation
  MOD_RES (2)..(2): Aminoisobutyric acid
  MISC_FEATURE (12)..(16): Lactam ring between side chains at positions 12 and 16
  MOD_RES (24)..(24): Cys-PEG
HXEGTFTSDYSKYLDERAAKDFVCWLMNT

SEQ ID NO: 318 - protein, 29 aa, Artificial Sequence
  Synthetic peptide
  MISC_FEATURE: c-term amidation
  MOD_RES (2)..(2): Aminoisobutyric acid
  MISC_FEATURE (16)..(20): Lactam ring between side chains at positions 16 and 20
  MOD_RES (24)..(24): Cys-PEG
HXEGTFTSDYSKYLDKRAAEDFVCWLMNT

SEQ ID NO: 319 - protein, 29 aa, Artificial Sequence
  Synthetic peptide
  MISC_FEATURE: c-term amidation
  MOD_RES (2)..(2): Aminoisobutyric acid
  MOD_RES (24)..(24): Cys-PEG
HXEGTFTSDYSKYLDEQAAKEFICWLMNT

SEQ ID NO: 320 - protein, 29 aa, Artificial Sequence
  Synthetic peptide
  MISC_FEATURE: c-term amidation
  MOD_RES (2)..(2): Aminoisobutyric acid
  MISC_FEATURE (12)..(16): Lactam ring between side chains at positions 12 and 16
  MOD_RES (24)..(24): Cys-PEG
HXEGTFTSDYSKYLDEQAAKEFICWLMNT

SEQ ID NO: 321 - protein, 29 aa, Artificial Sequence
  Synthetic peptide
  MISC_FEATURE: c-term amidation
  MOD_RES (2)..(2): Aminoisobutyric acid
  MISC_FEATURE (16)..(20): Lactam ring between side chains at position 16 and 20
  MOD_RES (24)..(24): Cys-PEG
HXEGTFTSDYSKYLDEQAAKEFICWLMNT

SEQ ID NO: 322 - protein, 29 aa, Artificial Sequence
  Synthetic peptide
  MISC_FEATURE: c-term amidation
  MOD_RES (2)..(2): Aminoisobutyric acid
  MOD_RES (24)..(24): Cys-PEG
HXEGTFTSDYSKYLDEQAAKEFICWLVKG

SEQ ID NO: 323 - protein, 29 aa, Artificial Sequence
  Synthetic peptide
  MISC_FEATURE: c-term amidation
  MOD_RES (2)..(2): Aminoisobutyric acid
  MISC_FEATURE (12)..(16): Lactam ring between side chains at positions 12 and 16
  MOD_RES (24)..(24): Cys-PEG
HXEGTFTSDYSKYLDEQAAKEFICWLVKG

SEQ ID NO: 324 - protein, 29 aa, Artificial Sequence
  Synthetic peptide
  MISC_FEATURE: c-term amidation
  MOD_RES (2)..(2): Aminoisobutyric acid
  MISC_FEATURE (16)..(20): Lactam ring between side chains at position 16 and 20
  MOD_RES (24)..(24): Cys-PEG
HXEGTFTSDYSKYLDEQAAKEFICWLVKG

SEQ ID NO: 325 - protein, 29 aa, Artificial Sequence
  Synthetic peptide
  MISC_FEATURE: c-term amidation
  MOD_RES (2)..(2): D-Ala
  MOD_RES (24)..(24): Cys-PEG
HXEGTFTSDYSKYLDERRAQDFVCWLMNT

SEQ ID NO: 326 - protein, 29 aa, Artificial Sequence
  Synthetic peptide
  MISC_FEATURE: c-term amidation
  MOD_RES (2)..(2): D-Ala
  MOD_RES (24)..(24): Cys-PEG
HXEGTFTSDYSKYLDERRAKDFVCWLMNT

SEQ ID NO: 327 - protein, 29 aa, Artificial Sequence
  Synthetic peptide
  MISC_FEATURE: c-term amidation
  MOD_RES (2)..(2): D-Ala
  MISC_FEATURE (16)..(20): Lactam ring between side chains at positions 16 and 20
  MOD_RES (24)..(24): Cys-PEG
HXEGTFTSDYSKYLDERRAKDFVCWLMNT

SEQ ID NO: 328 - protein, 29 aa, Artificial Sequence
  Synthetic peptide
  MISC_FEATURE: c-term amidation
  MOD_RES (2)..(2): D-Ala
  MISC_FEATURE (12)..(16): Lactam between side chains at positions 12 and 16
  MOD_RES (24)..(24): Cys-PEG
HXEGTFTSDYSKYLDERRAQDFVCWLMNT

SEQ ID NO: 329 - protein, 29 aa, Artificial Sequence
  Synthetic peptide
  MISC_FEATURE: c-term amidation
  MOD_RES (2)..(2): D-Ala
  MISC_FEATURE (12)..(16): Lactam ring between side chains at positions 12 and 16
  MOD_RES (24)..(24): Cys-PEG
HXEGTFTSDYSKYLDERRAKDFVCWLMNT

SEQ ID NO: 330 - protein, 29 aa, Artificial Sequence
  Synthetic peptide
  MISC_FEATURE: c-term amidation
  MOD_RES (2)..(2): D-Ala
  MISC_FEATURE (16)..(20): Lactam ring between side chains at positions 16 and 20
  MOD_RES (24)..(24): Cys-PEG
HXEGTFTSDYSKYLDKRRAEDFVCWLMNT

SEQ ID NO: 331 - protein, 29 aa, Artificial Sequence
  Synthetic peptide
  MISC_FEATURE: c-term amidation
  MOD_RES (2)..(2): D-Ala
  MOD_RES (24)..(24): Cys-PEG
HXEGTFTSDYSKYLDERAAKDFVCWLMNT

SEQ ID NO: 332 - protein, 29 aa, Artificial Sequence
  Synthetic peptide
  MISC_FEATURE: c-term amidation
  MOD_RES (2)..(2): D-Ala
  MISC_FEATURE (16)..(20): Lactam ring between side chains at positions 16 and 20
  MOD_RES (24)..(24): Cys-PEG
HXEGTFTSDYSKYLDERAAKDFVCWLMNT

SEQ ID NO: 333 - protein, 29 aa, Artificial Sequence
  Synthetic peptide
  MISC_FEATURE: c-term amidation
  MOD_RES (2)..(2): D-Ala
  MISC_FEATURE (12)..(16): Lactam ring between side chains at positions 12 and 16
  MOD_RES (24)..(24): Cys-PEG
HXEGTFTSDYSKYLDERAAQDFVCWLMNT

SEQ ID NO: 334 - protein, 29 aa, Artificial Sequence
  Synthetic peptide
  MISC_FEATURE: c-term amidation
  MOD_RES (2)..(2): D-Ala
  MISC_FEATURE (12)..(16): Lactam ring between side chains at positions 12 and 16
  MOD_RES (24)..(24): Cys-PEG
HXEGTFTSDYSKYLDERAAKDFVCWLMNT

SEQ ID NO: 335 - protein, 29 aa, Artificial Sequence
  Synthetic peptide
  MISC_FEATURE: c-term amidation
  MOD_RES (2)..(2): D-Ala
  MISC_FEATURE (12)..(16): Lactam ring between side chainst at positions 16 and 20
  MOD_RES (24)..(24): Cys-PEG
HXEGTFTSDYSKYLDKRAAEDFVCWLMNT

SEQ ID NO: 336 - protein, 29 aa, Artificial Sequence
  Synthetic peptide
  MISC_FEATURE: c-term amidation
  MOD_RES (2)..(2): D-Ala
  MOD_RES (24)..(24): Cys-PEG
HXEGTFTSDYSKYLDEQAAKEFICWLMNT

SEQ ID NO: 337 - protein, 29 aa, Artificial Sequence
  Synthetic peptide
  MISC_FEATURE: c-term amidation
  MOD_RES (2)..(2): D-Ala
  MISC_FEATURE (12)..(16): Lactam ring between side chains at positions 12 and 16
  MOD_RES (24)..(24): Cys-PEG
HXEGTFTSDYSKYLDEQAAKEFICWLMNT

SEQ ID NO: 338 - protein, 29 aa, Artificial Sequence
  Synthetic peptide
  MISC_FEATURE: c-term amidation
  MOD_RES (2)..(2): D-Ala
  MISC_FEATURE (16)..(20): Lactam right between side chains at positions 16 and 20
  MOD_RES (24)..(24): Cys-PEG
HXEGTFTSDYSKYLDEQAAKEFICWLMNT

SEQ ID NO: 339 - protein, 29 aa, Artificial Sequence
  Synthetic peptide
  MISC_FEATURE: c-term amidation
  MOD_RES (2)..(2): D-Ala
  MOD_RES (24)..(24): Cys-PEG
HXEGTFTSDYSKYLDEQAAKEFICWLVKG

SEQ ID NO: 340 - protein, 29 aa, Artificial Sequence
  Synthetic peptide
  MISC_FEATURE: c-term amidation
  MOD_RES (2)..(2): D-Ala
  MISC_FEATURE (12)..(16): Lactam ring between side chains at positions 12 and 16
  MOD_RES (24)..(24): Cys-PEG
HXEGTFTSDYSKYLDEQAAKEFICWLVKG

SEQ ID NO: 341 - protein, 29 aa, Artificial Sequence
  Synthetic peptide
  MISC_FEATURE: c-term amidation
  MOD_RES (2)..(2): D-Ala
  MISC_FEATURE (16)..(20): Lactam ring between side chains at positions 16 and 20
  MOD_RES (24)..(24): Cys-PEG
HXEGTFTSDYSKYLDEQAAKEFICWLVKG

SEQ ID NO: 342 - protein, 29 aa, Artificial Sequence
  Synthetic peptide
  MISC_FEATURE: c-term amidation
  MOD_RES (16)..(16): Cys-PEG
HSQGTFTSDYSKYLDCRRAKDFVQWLMNT

SEQ ID NO: 343 - protein, 29 aa, Artificial Sequence
  Synthetic peptide
  MISC_FEATURE: c-term amidation
  MOD_RES (16)..(16): Cys-PEG
HSQGTFTSDYSKYLDCRAAKDFVQWLMNT

SEQ ID NO: 344 - protein, 29 aa, Artificial Sequence
  Synthetic peptide
  MISC_FEATURE: c-term amidation
  MOD_RES (16)..(16): Cys-PEG
HSQGTFTSDYSKYLDCQAAKEFIAWLMNT

SEQ ID NO: 345 - protein, 29 aa, Artificial Sequence
  Synthetic peptide
  MISC_FEATURE: c-term amidation
  MOD_RES (16)..(16): Cys-PEG
HSQGTFTSDYSKYLDCQAAKEFIAWLVKG

SEQ ID NO: 346 - protein, 29 aa, Artificial Sequence
  Synthetic peptide
  MISC_FEATURE: c-term amidation
  MOD_RES (1)..(1): (Des-amino)His
  MOD_RES (16)..(16): Cys-PEG
XSQGTFTSDYSKYLDCRRAKDFVQWLMNT

SEQ ID NO: 347 - protein, 29 aa, Artificial Sequence
  Synthetic peptide
  MISC_FEATURE: c-term amidation
  MOD_RES (1)..(1): (Des-amino)His
  MOD_RES (16)..(16): Cys-PEG
XSQGTFTSDYSKYLDCRAAKDFVQWLMNT

SEQ ID NO: 348 - protein, 29 aa, Artificial Sequence
  Synthetic peptide
  MISC_FEATURE: c-term amidation
  MOD_RES (1)..(1): (Des-amino)His
  MOD_RES (16)..(16): Cys-PEG
XSQGTFTSDYSKYLDCQAAKEFIAWLMNT

SEQ ID NO: 349 - protein, 29 aa, Artificial Sequence
  Synthetic peptide
  MISC_FEATURE: c-term amidation
  MOD_RES (1)..(1): (Des-amino)His
  MOD_RES (16)..(16): Cys-PEG
XSQGTFTSDYSKYLDCQAAKEFIAWLVKG

SEQ ID NO: 350 - protein, 29 aa, Artificial Sequence
  Synthetic peptide
  MISC_FEATURE: c-term amidation
  MOD_RES (1)..(1): (Des-amino)His
  MOD_RES (16)..(16): Cys-PEG
XSQGTFTSDYSKYLDCQAAKEFIAWLMNT

SEQ ID NO: 351 - protein, 29 aa, Artificial Sequence
  Synthetic peptide
  MISC_FEATURE: c-term amidation
  MOD_RES (2)..(2): Aminoisobutyric acid
  MOD_RES (16)..(16): Cys-PEG
HXQGTFTSDYSKYLDCRAAKDFVQWLMNT

SEQ ID NO: 352 - protein, 29 aa, Artificial Sequence
  Synthetic peptide
  MISC_FEATURE: c-term amidation
  MOD_RES (2)..(2): Aminoisobutyric acid
  MOD_RES (16)..(16): Cys-PEG
HXQGTFTSDYSKYLDCQAAKEFIAWLMNT

SEQ ID NO: 353 - protein, 29 aa, Artificial Sequence
  Synthetic peptide
  MISC_FEATURE: c-term amidation
  MOD_RES (2)..(2): Aminoisobutyric acid
  MOD_RES (16)..(16): Cys-PEG
HXQGTFTSDYSKYLDCQAAKEFIAWLVKG

SEQ ID NO: 354 - protein, 29 aa, Artificial Sequence
  Synthetic peptide
  MISC_FEATURE: c-term amidation
  MOD_RES (2)..(2): D-Ala
  MOD_RES (16)..(16): Cys-PEG
HXQGTFTSDYSKYLDCRRAKDFVQWLMNT

SEQ ID NO: 355 - protein, 29 aa, Artificial Sequence
  Synthetic peptide
  MISC_FEATURE: c-term amidation
  MOD_RES (2)..(2): D-Ala
  MOD_RES (16)..(16): Cys-PEG
HXQGTFTSDYSKYLDCRAAKDFVQWLMNT

SEQ ID NO: 356 - protein, 29 aa, Artificial Sequence
  Synthetic peptide
  MISC_FEATURE: c-term amidation
  MOD_RES (2)..(2): D-Ala
  MOD_RES (16)..(16): Cys-PEG
HXQGTFTSDYSKYLDCQAAKEFIAWLMNT

SEQ ID NO: 357 - protein, 29 aa, Artificial Sequence
  Synthetic peptide
  MISC_FEATURE: c-term amidation
  MOD_RES (2)..(2): D-Ala
  MOD_RES (16)..(16): Cys-PEG
HXQGTFTSDYSKYLDCQAAKEFIAWLVKG

SEQ ID NO: 358 - protein, 29 aa, Artificial Sequence
  Synthetic peptide
  MISC_FEATURE: c-term amidation
  MOD_RES (16)..(16): Cys-PEG
HSEGTFTSDYSKYLDCRRAKDFVQWLMNT

SEQ ID NO: 359 - protein, 29 aa, Artificial Sequence
  Synthetic peptide
  MISC_FEATURE: c-term amidation
  MOD_RES (16)..(16): Cys-PEG
HSEGTFTSDYSKYLDCRAAKDFVQWLMNT

SEQ ID NO: 360 - protein, 29 aa, Artificial Sequence
  Synthetic peptide
  MISC_FEATURE: c-term amidation
  MOD_RES (16)..(16): Cys-PEG
HSEGTFTSDYSKYLDCQAAKEFIAWLMNT

SEQ ID NO: 361 - protein, 29 aa, Artificial Sequence
  Synthetic peptide
  MISC_FEATURE: c-term amidation
  MOD_RES (16)..(16): Cys-PEG
HSEGTFTSDYSKYLDCQAAKEFIAWLVKG

SEQ ID NO: 362 - protein, 29 aa, Artificial Sequence
  Synthetic peptide
  MISC_FEATURE: c-term amidation
  MOD_RES (1)..(1): (Des-amino)His
  MOD_RES (16)..(16): Cys-PEG
XSEGTFTSDYSKYLDCRRAKDFVQWLMNT

SEQ ID NO: 363 - protein, 29 aa, Artificial Sequence
  Synthetic peptide
  MISC_FEATURE: c-term amidation
  MOD_RES (1)..(1): (Des-amino)His
  MOD_RES (16)..(16): Cys-PEG
XSEGTFTSDYSKYLDCRAAKDFVQWLMNT

SEQ ID NO: 364 - protein, 29 aa, Artificial Sequence
  Synthetic peptide
  MISC_FEATURE: c-term amidation
  MOD_RES (1)..(1): (Des-amino)His
  MOD_RES (16)..(16): Cys-PEG
XSEGTFTSDYSKYLDCQAAKEFIAWLMNT

SEQ ID NO: 365 - protein, 29 aa, Artificial Sequence
  Synthetic peptide
  MISC_FEATURE: c-term amidation
  MOD_RES (1)..(1): (Des-amino)His
  MOD_RES (16)..(16): Cys-PEG
XSEGTFTSDYSKYLDCQAAKEFIAWLVKG

SEQ ID NO: 366 - protein, 29 aa, Artificial Sequence
  Synthetic peptide
  MISC_FEATURE: c-term amidation
  MOD_RES (2)..(2): D-Ala
  MOD_RES (16)..(16): Cys-PEG
HXEGTFTSDYSKYLDCRRAKDFVQWLMNT

SEQ ID NO: 367 - protein, 29 aa, Artificial Sequence
  Synthetic peptide
  MISC_FEATURE: c-term amidation
  MOD_RES (2)..(2): D-Ala
  MOD_RES (16)..(16): Cys-PEG
HXEGTFTSDYSKYLDCRAAKDFVQWLMNT

SEQ ID NO: 368 - protein, 29 aa, Artificial Sequence
  Synthetic peptide
  MISC_FEATURE: c-term amidation
  MOD_RES (2)..(2): D-Ala
  MOD_RES (16)..(16): Cys-PEG
HXEGTFTSDYSKYLDCQAAKEFIAWLMNT

SEQ ID NO: 369 - protein, 29 aa, Artificial Sequence
  Synthetic peptide
  MISC_FEATURE: c-term amidation
  MOD_RES (2)..(2): D-Ala
  MOD_RES (16)..(16): Cys-PEG
HXEGTFTSDYSKYLDCQAAKEFIAWLVKG

SEQ ID NO: 370 - protein, 29 aa, Artificial Sequence
  Synthetic peptide
  MISC_FEATURE: c-term amidation
  MOD_RES (2)..(2): D-Ala
  MOD_RES (16)..(16): Cys-PEG
HXEGTFTSDYSKYLDCRRAKDFVQWLMNT

SEQ ID NO: 371 - protein, 29 aa, Artificial Sequence
  Synthetic peptide
  MISC_FEATURE: c-term amidation
  MOD_RES (2)..(2): D-Ala
  MOD_RES (16)..(16): Cys-PEG
HXEGTFTSDYSKYLDCRAAKDFVQWLMNT

SEQ ID NO: 372 - protein, 29 aa, Artificial Sequence
  Synthetic peptide
  MISC_FEATURE: c-term amidation
  MOD_RES (2)..(2): D-Ala
  MOD_RES (16)..(16): Cys-PEG
HXEGTFTSDYSKYLDCQAAKEFIAWLMNT

SEQ ID NO: 373 - protein, 29 aa, Artificial Sequence
  Synthetic peptide
  MISC_FEATURE: c-term amidation
  MOD_RES (2)..(2): D-Ala
  MOD_RES (16)..(16): Cys-PEG
HXEGTFTSDYSKYLDCQAAKEFIAWLVKG

SEQ ID NO: 374 - protein, 29 aa, Artificial Sequence
  Synthetic peptide
  MISC_FEATURE: c-term amidation
HSQGTFTSDYSKYLDERRAQDFVQWLMDT

SEQ ID NO: 375 - protein, 29 aa, Artificial Sequence
  Synthetic peptide
  MISC_FEATURE: c-term amidation
HSQGTFTSDYSKYLDERRAKDFVQWLMDT

SEQ ID NO: 376 - protein, 29 aa, Artificial Sequence
  Synthetic peptide
  MISC_FEATURE: c-term amidation
  MISC_FEATURE (16)..(20): Lactam ring between side chains at positions 16 and 20
HSQGTFTSDYSKYLDERRAKDFVQWLMDT

SEQ ID NO: 377 - protein, 29 aa, Artificial Sequence
  Synthetic peptide
  MISC_FEATURE: c-term amidation
  MISC_FEATURE (12)..(16): Lactam ring between side chains at positions 12 and 16
HSQGTFTSDYSKYLDERRAQDFVQWLMDT

SEQ ID NO: 378 - protein, 29 aa, Artificial Sequence
  Synthetic peptide
  MISC_FEATURE: c-term amidation
  MISC_FEATURE (12)..(16): Lactam ring between side chains at positions 12 and 16
HSQGTFTSDYSKYLDERRAKDFVQWLMDT

SEQ ID NO: 379 - protein, 29 aa, Artificial Sequence
  Synthetic peptide
  MISC_FEATURE: c-term amidation
  MISC_FEATURE (16)..(20): Lactam ring between side chains at positions 16 and 20
HSQGTFTSDYSKYLDKRRAEDFVQWLMDT

SEQ ID NO: 380 - protein, 29 aa, Artificial Sequence
  Synthetic peptide
  MISC_FEATURE: c-term amidation
HSQGTFTSDYSKYLDERAAKDFVQWLMDT

SEQ ID NO: 381 - protein, 29 aa, Artificial Sequence
  Synthetic peptide
  MISC_FEATURE: c-term amidation; lactam ring between side chains at positions 16 and 20
HSQGTFTSDYSKYLDERAAKDFVQWLMDT

SEQ ID NO: 382 - protein, 29 aa, Artificial Sequence
  Synthetic peptide
  MISC_FEATURE: c-term amidation
  MISC_FEATURE (12)..(16): Lactam ring between side chains at positions 12 and 16
HSQGTFTSDYSKYLDERAAQDFVQWLMDT

SEQ ID NO: 383 - protein, 29 aa, Artificial Sequence
  Synthetic peptide
  MISC_FEATURE: c-term amidation
  MISC_FEATURE (12)..(16): Lactam ring between side chains at positions 12 and 16
HSQGTFTSDYSKYLDERAAKDFVQWLMDT

SEQ ID NO: 384 - protein, 29 aa, Artificial Sequence
  Synthetic peptide
  MISC_FEATURE: c-term amidation
  MISC_FEATURE (16)..(20): Lactam ring between side chains at positions 16 and 20
HSQGTFTSDYSKYLDKRAAEDFVQWLMDT

SEQ ID NO: 385 - protein, 29 aa, Artificial Sequence
  Synthetic peptide
  MISC_FEATURE: c-term amidation
HSQGTFTSDYSKYLDEQAAKEFIAWLMDT

SEQ ID NO: 386 - protein, 29 aa, Artificial Sequence
  Synthetic peptide
  MISC_FEATURE: c-term amidation
  MISC_FEATURE (12)..(16): Lactam ring between side chains at positions 12 and 16
HSQGTFTSDYSKYLDEQAAKEFIAWLMDT

SEQ ID NO: 387 - protein, 29 aa, Artificial Sequence
  Synthetic peptide
  MISC_FEATURE: c-term amidation
  MISC_FEATURE (16)..(20): Lactam ring between side chains at positions 16 and 20
HSQGTFTSDYSKYLDEQAAKEFIAWLMDT

SEQ ID NO: 388 - protein, 29 aa, Artificial Sequence
  Synthetic peptide
  MISC_FEATURE: c-term amidation
  MOD_RES (1)..(1): (Des-amino)His
XSQGTFTSDYSKYLDERRAQDFVQWLMDT

SEQ ID NO: 389 - protein, 29 aa, Artificial Sequence
  Synthetic peptide
  MISC_FEATURE: c-term amidation
  MOD_RES (1)..(1): (Des-amino)His
XSQGTFTSDYSKYLDERRAKDFVQWLMDT

SEQ ID NO: 390 - protein, 29 aa, Artificial Sequence
  Synthetic peptide
  MISC_FEATURE: c-term amidation
  MOD_RES (1)..(1): (Des-amino)His
  MISC_FEATURE (16)..(20): Lactam ring between side chains at positions 16 and 20
XSQGTFTSDYSKYLDERRAKDFVQWLMDT

SEQ ID NO: 391 - protein, 29 aa, Artificial Sequence
  Synthetic peptide
  MISC_FEATURE: c-term amidation
  MOD_RES (1)..(1): (Des-amino)His
  MISC_FEATURE (12)..(16): Lactam ring between side chains at positions 12 and 16
XSQGTFTSDYSKYLDERRAQDFVQWLMDT

SEQ ID NO: 392 - protein, 29 aa, Artificial Sequence
  Synthetic peptide
  misc_feature (1)..(1): Xaa can be any naturally occurring amino acid
XSQGTFTSDYSKYLDERRAKDFVQWLMDT

SEQ ID NO: 393 - protein, 29 aa, Artificial Sequence
  Synthetic peptide
  MISC_FEATURE: c-term amidation
  MOD_RES (1)..(1): (Des-amino)His
  MISC_FEATURE (16)..(20): Lactam ring between side chains at positions 16 and 20
XSQGTFTSDYSKYLDKRRAEDFVQWLMDT

SEQ ID NO: 394 - protein, 29 aa, Artificial Sequence
  Synthetic peptide
  MISC_FEATURE: c-term amidation
  MOD_RES (1)..(1): (Des-amino)His
XSQGTFTSDYSKYLDERAAKDFVQWLMDT

SEQ ID NO: 395 - protein, 29 aa, Artificial Sequence
  Synthetic peptide
  MISC_FEATURE: c-term amidation
  MOD_RES (1)..(1): (Des-amino)His
  MISC_FEATURE (16)..(20): Lactam ring between side chains at positions 16 and 20
XSQGTFTSDYSKYLDERAAKDFVQWLMDT

SEQ ID NO: 396 - protein, 29 aa, Artificial Sequence
  Synthetic peptide
  MISC_FEATURE: c-term amidation
  MOD_RES (1)..(1): (Des-amino)His
  MISC_FEATURE (12)..(16): Lactam ring between side chains at positions 12 and 16
XSQGTFTSDYSKYLDERAAQDFVQWLMDT

SEQ ID NO: 397 - protein, 29 aa, Artificial Sequence
  Synthetic peptide
  MISC_FEATURE: c-term amidation
  MOD_RES (1)..(1): (Des-amino)His
  MISC_FEATURE (12)..(16): Lactam ring between side chains at positions 12 and 16
XSQGTFTSDYSKYLDERAAKDFVQWLMDT

SEQ ID NO: 398 - protein, 29 aa, Artificial Sequence
  Synthetic peptide
  MISC_FEATURE: c-term amidation
  MOD_RES (1)..(1): (Des-amino)His
  MISC_FEATURE (16)..(20): Lactam ring between side chains at positions 16 and 20
XSQGTFTSDYSKYLDKRAAEDFVQWLMDT

SEQ ID NO: 399 - protein, 29 aa, Artificial Sequence
  Synthetic peptide
  MISC_FEATURE: c-term amidation
  MOD_RES (1)..(1): (Des-amino)His
XSQGTFTSDYSKYLDEQAAKEFIAWLMDT

SEQ ID NO: 400 - protein, 29 aa, Artificial Sequence
  Synthetic peptide
  MISC_FEATURE: c-term amidation
  MOD_RES (1)..(1): (Des-amino)His
  MISC_FEATURE (12)..(16): Lactam ring between side chains at positions 12 and 16
XSQGTFTSDYSKYLDEQAAKEFIAWLMDT

SEQ ID NO: 401 - protein, 29 aa, Artificial Sequence
  Synthetic peptide
  MISC_FEATURE: c-term amidation
  MOD_RES (1)..(1): (Des-amino)His
  MISC_FEATURE (16)..(20): Lactam ring between side chains at positions 16 and 20
XSQGTFTSDYSKYLDEQAAKEFIAWLMDT

SEQ ID NO: 402 - protein, 29 aa, Artificial Sequence
  Synthetic peptide
  MISC_FEATURE: c-term amidation
  MOD_RES (2)..(2): Aminoisobutyric acid
HXQGTFTSDYSKYLDERRAQDFVQWLMDT

SEQ ID NO: 403 - protein, 29 aa, Artificial Sequence
  Synthetic peptide
  MISC_FEATURE: c-term amidation
  MOD_RES (2)..(2): Aminoisobutyric acid
HXQGTFTSDYSKYLDERRAKDFVQWLMDT

SEQ ID NO: 404 - protein, 29 aa, Artificial Sequence
  Synthetic peptide
  MISC_FEATURE: c-term amidation
  MOD_RES (2)..(2): Aminoisobutyric acid
  MISC_FEATURE (16)..(20): Lactam ring between side chains at positions 16 and 20
HXQGTFTSDYSKYLDERRAKDFVQWLMDT

SEQ ID NO: 405 - protein, 29 aa, Artificial Sequence
  Synthetic peptide
  MISC_FEATURE: c-term amidation
  MOD_RES (2)..(2): aminoisobutyric acid
  MISC_FEATURE (12)..(16): Lactam ring between side chains at positions 12 and 16
HXQGTFTSDYSKYLDERRAQDFVQWLMDT

SEQ ID NO: 406 - protein, 29 aa, Artificial Sequence
  Synthetic peptide
  MISC_FEATURE: c-term amidation
  MOD_RES (2)..(2): Aminoisobutyric acid
  MISC_FEATURE (12)..(16): Lactam ring between side chains at positions 12 and 16
HXQGTFTSDYSKYLDERRAKDFVQWLMDT

SEQ ID NO: 407 - protein, 29 aa, Artificial Sequence
  Synthetic peptide
  MISC_FEATURE: c-term amidation
  MOD_RES (2)..(2): Aminoisobutyric acid
  MISC_FEATURE (16)..(20): Lactam ring between side chains at positions 16 and 20
HXQGTFTSDYSKYLDKRRAEDFVQWLMDT

SEQ ID NO: 408 - protein, 29 aa, Artificial Sequence
  Synthetic peptide
  MOD_RES (2)..(2): Aminoisobutyric acid
  MISC_FEATURE (2)..(2): c-term amidation
HXQGTFTSDYSKYLDERAAKDFVQWLMDT

SEQ ID NO: 409 - protein, 29 aa, Artificial Sequence
  Synthetic peptide
  MISC_FEATURE: c-term amidation
  MOD_RES (2)..(2): Aminoisobutyric acid
  MISC_FEATURE (16)..(20): Lactam ring between side chains at positions 16 and 20
HXQGTFTSDYSKYLDERAAKDFVQWLMDT

SEQ ID NO: 410 - protein, 29 aa, Artificial Sequence
  Synthetic peptide
  MISC_FEATURE: c-term amidation
  MOD_RES (2)..(2): Aminoisobutyric acid
  MISC_FEATURE (12)..(16): Lactam ring between side chains at positions 12 and 16
HXQGTFTSDYSKYLDERAAQDFVQWLMDT

SEQ ID NO: 411 - protein, 29 aa, Artificial Sequence
  Synthetic peptide
  MISC_FEATURE: c-term amidation
  MOD_RES (2)..(2): Aminoisobutyric acid
  MISC_FEATURE (12)..(16): Lactam ring between side chains at positions 12 and 16
HXQGTFTSDYSKYLDERAAKDFVQWLMDT

SEQ ID NO: 412 - protein, 29 aa, Artificial Sequence
  Synthetic peptide
  MISC_FEATURE: c-term amidation
  MOD_RES (2)..(2): Aminoisobutyric acid
  MISC_FEATURE (12)..(16): Lactam ring between side chains at positions 16 and 20
HXQGTFTSDYSKYLDKRAAEDFVQWLMDT

SEQ ID NO: 413 - protein, 29 aa, Artificial Sequence
  Synthetic peptide
  MISC_FEATURE: c-term amidation
  MOD_RES (2)..(2): Aminoisobutyric acid
HXQGTFTSDYSKYLDEQAAKEFIAWLMDT

SEQ ID NO: 414 - protein, 29 aa, Artificial Sequence
  Synthetic peptide
  MISC_FEATURE: c-term amidation
  MOD_RES (2)..(2): Aminoisobutyric acid
  MISC_FEATURE (12)..(16): Lactam ring between side chains at positions 12 and 16
HXQGTFTSDYSKYLDEQAAKEFIAWLMDT

SEQ ID NO: 415 - protein, 29 aa, Artificial Sequence
  Synthetic peptide
  MISC_FEATURE: c-term amidation
  MOD_RES (2)..(2): Aminoisobutyric acid
  MISC_FEATURE (16)..(20): Lactam ring between side chains at positions 16 and 20
HXQGTFTSDYSKYLDEQAAKEFIAWLMDT

SEQ ID NO: 416 - protein, 29 aa, Artificial Sequence
  Synthetic peptide
  MISC_FEATURE: c-term amidation
  MOD_RES (2)..(2): D-Ala
HXQGTFTSDYSKYLDERRAQDFVQWLMDT

SEQ ID NO: 417 - protein, 29 aa, Artificial Sequence
  Synthetic peptide
  MISC_FEATURE: c-term amidation
  MOD_RES (2)..(2): D-Ala
HXQGTFTSDYSKYLDERRAKDFVQWLMDT

SEQ ID NO: 418 - protein, 29 aa, Artificial Sequence
  Synthetic peptide
  MISC_FEATURE: c-term amidation
  MOD_RES (2)..(2): D-Ala
  MISC_FEATURE (16)..(20): Lactam ring between side chains at positions 16 and 20
HXQGTFTSDYSKYLDERRAKDFVQWLMDT

SEQ ID NO: 419 - protein, 29 aa, Artificial Sequence
  Synthetic peptide
  MISC_FEATURE: c-term amidation
  MOD_RES (2)..(2): D-Ala
  MISC_FEATURE (12)..(16): Lactam ring between side chains at positions 12 and 16
HXQGTFTSDYSKYLDERRAQDFVQWLMDT

SEQ ID NO: 420 - protein, 29 aa, Artificial Sequence
  Synthetic peptide
  MISC_FEATURE: c-term amidation
  MOD_RES (2)..(2): D-Ala
  MISC_FEATURE (12)..(16): Lactam ring between side chains at positions 12 and 16
HXQGTFTSDYSKYLDERRAKDFVQWLMDT

SEQ ID NO: 421 - protein, 29 aa, Artificial Sequence
  Synthetic peptide
  MISC_FEATURE: c-term amidation
  MOD_RES (2)..(2): D-Ala
  MISC_FEATURE (16)..(20): Lactam ring between side chains at positions 16 and 20
HXQGTFTSDYSKYLDKRRAEDFVQWLMDT

SEQ ID NO: 422 - protein, 29 aa, Artificial Sequence
  Synthetic peptide
  MISC_FEATURE: c-term amidation
  MOD_RES (2)..(2): D-Ala
HXQGTFTSDYSKYLDERAAKDFVQWLMDT

SEQ ID NO: 423 - protein, 29 aa, Artificial Sequence
  Synthetic peptide
  MISC_FEATURE: c-term amidation
  MOD_RES (2)..(2): D-Ala
  MISC_FEATURE (16)..(20): Lactam ring between side chains at positions 16 and 20
HXQGTFTSDYSKYLDERAAKDFVQWLMDT

SEQ ID NO: 424 - protein, 29 aa, Artificial Sequence
  Synthetic peptide
  MISC_FEATURE: c-term amidation
  MOD_RES (2)..(2): D-Ala
  MISC_FEATURE (12)..(16): Lactam ring between side chains at positions 12 and 16
HXQGTFTSDYSKYLDERAAQDFVQWLMDT

SEQ ID NO: 425 - protein, 29 aa, Artificial Sequence
  Synthetic peptide
  MISC_FEATURE: c-term amidation
  MOD_RES (2)..(2): D-Ala
  MISC_FEATURE (12)..(16): Lactam ring between side chains at positions 12 and 16
HXQGTFTSDYSKYLDERAAKDFVQWLMDT

SEQ ID NO: 426 - protein, 29 aa, Artificial Sequence
  Synthetic peptide
  MISC_FEATURE: c-term amidation
  MOD_RES (2)..(2): D-Ala
  MISC_FEATURE (16)..(20): Lactam ring between side chains at positions 16 and 20
HXQGTFTSDYSKYLDKRAAEDFVQWLMDT

SEQ ID NO: 427 - protein, 29 aa, Artificial Sequence
  Synthetic peptide
  MISC_FEATURE: c-term amidation
  MOD_RES (2)..(2): D-Ala
HXQGTFTSDYSKYLDEQAAKEFIAWLMDT

SEQ ID NO: 428 - protein, 29 aa, Artificial Sequence
  Synthetic peptide
  MISC_FEATURE: c-term amidation
  MOD_RES (2)..(2): D-Ala
  MISC_FEATURE (12)..(16): Lactam ring between side chains at positions 12 and 16
HXQGTFTSDYSKYLDEQAAKEFIAWLMDT

SEQ ID NO: 429 - protein, 29 aa, Artificial Sequence
  Synthetic peptide
  MISC_FEATURE: c-term amidation
  MOD_RES (2)..(2): D-Ala
  MISC_FEATURE (16)..(20): Lactam ring between side chains at positions 16 and 20
HXQGTFTSDYSKYLDEQAAKEFIAWLMDT

SEQ ID NO: 430 - protein, 29 aa, Artificial Sequence
  Synthetic peptide
  MISC_FEATURE: c-term amidation
HSEGTFTSDYSKYLDERRAQDFVQWLMDT

SEQ ID NO: 431 - protein, 29 aa, Artificial Sequence
  Synthetic peptide
  MISC_FEATURE: c-term amidation
HSEGTFTSDYSKYLDERRAKDFVQWLMDT

SEQ ID NO: 432 - protein, 29 aa, Artificial Sequence
  Synthetic peptide
  MISC_FEATURE: c-term amidation
  MISC_FEATURE (16)..(20): Lactam ring between side chains at positions 16 and 20
HSEGTFTSDYSKYLDERRAKDFVQWLMDT

SEQ ID NO: 433 - protein, 29 aa, Artificial Sequence
  Synthetic peptide
  MISC_FEATURE: c-term amidation
  MISC_FEATURE (16)..(16): Lactam ring between side chains at positions 12 and 16
HSEGTFTSDYSKYLDERRAQDFVQWLMDT

SEQ ID NO: 434 - protein, 29 aa, Artificial Sequence
  Synthetic peptide
  MISC_FEATURE: c-term amidation
  MISC_FEATURE (12)..(16): Lactam ring between side chains at positions 12 and 16
HSEGTFTSDYSKYLDERRAKDFVQWLMDT

SEQ ID NO: 435 - protein, 29 aa, Artificial Sequence
  Synthetic peptide
  MISC_FEATURE: c-term amidation
  MISC_FEATURE (16)..(20): Lactam ring between side chains at positions 16 and 20
HSEGTFTSDYSKYLDKRRAEDFVQWLMDT

SEQ ID NO: 436 - protein, 29 aa, Artificial Sequence
  Synthetic peptide
  MISC_FEATURE: c-term amidation
HSEGTFTSDYSKYLDERAAKDFVQWLMDT

SEQ ID NO: 437 - protein, 29 aa, Artificial Sequence
  Synthetic peptide
  MISC_FEATURE: c-term amidation
  MISC_FEATURE: Lactam ring between side chains at positions 16 and 20
HSEGTFTSDYSKYLDERAAKDFVQWLMDT

SEQ ID NO: 438 - protein, 29 aa, Artificial Sequence
  Synthetic peptide
  MISC_FEATURE: c-term amidation
  MISC_FEATURE (12)..(16): Lactam ring between side chains at positions 12 and 16
HSEGTFTSDYSKYLDERAAQDFVQWLMDT

SEQ ID NO: 439 - protein, 29 aa, Artificial Sequence
  Synthetic peptide
  MISC_FEATURE: c-term amidation
  MISC_FEATURE (12)..(16): Lactam ring between side chains at positions 12 and 16
HSEGTFTSDYSKYLDERAAKDFVQWLMDT

SEQ ID NO: 440 - protein, 29 aa, Artificial Sequence
  Synthetic peptide
  MISC_FEATURE: c-term amidation
  MISC_FEATURE (16)..(20): Lactam ring between side chains at positions 16 and 20
HSEGTFTSDYSKYLDKRAAEDFVQWLMDT

SEQ ID NO: 441 - protein, 29 aa, Artificial Sequence
  Synthetic peptide
  MISC_FEATURE: c-term amidation
HSEGTFTSDYSKYLDEQAAKEFIAWLMDT

SEQ ID NO: 442 - protein, 29 aa, Artificial Sequence
  Synthetic peptide
  MISC_FEATURE: c-term amidation
  MISC_FEATURE (12)..(16): Lactam ring between side chains at positions 12 and 16
HSEGTFTSDYSKYLDEQAAKEFIAWLMDT

SEQ ID NO: 443 - protein, 29 aa, Artificial Sequence
  Synthetic peptide
  MISC_FEATURE: c-term amidation
  MISC_FEATURE (16)..(20): Lactam ring between side chains at positions 16 and 20
HSEGTFTSDYSKYLDEQAAKEFIAWLMDT

SEQ ID NO: 444 - protein, 29 aa, Artificial Sequence
  Synthetic peptide
  MISC_FEATURE: c-term amidation
  MOD_RES (1)..(1): (Des-amino)His
XSEGTFTSDYSKYLDERRAQDFVQWLMDT

SEQ ID NO: 445 - protein, 29 aa, Artificial Sequence
  Synthetic peptide
  MISC_FEATURE: c-term amidation
  MOD_RES (1)..(1): (Des-amino)His
XSEGTFTSDYSKYLDERRAKDFVQWLMDT

SEQ ID NO: 446 - protein, 29 aa, Artificial Sequence
  Synthetic peptide
  MISC_FEATURE: c-term amidation
  MOD_RES (1)..(1): (Des-amino)His
  MISC_FEATURE (16)..(20): Lactam ring between side chains at positions 16 and 20
XSEGTFTSDYSKYLDERRAKDFVQWLMDT

SEQ ID NO: 447 - protein, 29 aa, Artificial Sequence
  Synthetic peptide
  MISC_FEATURE: c-term amidation
  MISC_FEATURE: Lactam ring between side chains at positions 12 and 16
  MOD_RES (1)..(1): (Des-amino)His
XSEGTFTSDYSKYLDERRAQDFVQWLMDT

SEQ ID NO: 448 - protein, 29 aa, Artificial Sequence
  Synthetic peptide
  MISC_FEATURE: c-term amidation
  MOD_RES (1)..(1): (Des-amino)His
  MISC_FEATURE (12)..(16): Lactam ring between side chains at positions 12 and 16
XSEGTFTSDYSKYLDERRAKDFVQWLMDT

SEQ ID NO: 449 - protein, 29 aa, Artificial Sequence
  Synthetic peptide
  MISC_FEATURE: c-term amidation
  MOD_RES (1)..(1): (Des-amino)His
  MISC_FEATURE (16)..(20): Lactam ring between side chains at positions 16 and 20
XSEGTFTSDYSKYLDKRRAEDFVQWLMDT

SEQ ID NO: 450 - protein, 29 aa, Artificial Sequence
  Synthetic peptide
  MISC_FEATURE: c-term amidation
  MOD_RES (1)..(1): (Des-amino)His
XSEGTFTSDYSKYLDERAAKDFVQWLMDT

SEQ ID NO: 451 - protein, 29 aa, Artificial Sequence
  Synthetic peptide
  MISC_FEATURE: c-term amidation
  MOD_RES (1)..(1): (Des-amino)His
  MISC_FEATURE (16)..(20): Lactam ring between side chains at positions 16 and 20
XSEGTFTSDYSKYLDERAAKDFVQWLMDT

SEQ ID NO: 452 - protein, 29 aa, Artificial Sequence
  Synthetic peptide
  MISC_FEATURE: C-term amidation
  MOD_RES (1)..(1): (Des-amino)His
  MISC_FEATURE (12)..(16): Lactam ring between side chains at positions 12 and 16
XSEGTFTSDYSKYLDERAAQDFVQWLMDT

SEQ ID NO: 453 - protein, 29 aa, Artificial Sequence
  Synthetic peptide
  MISC_FEATURE: c-term amidation
  MOD_RES (1)..(1): (Des-amino)His
  MISC_FEATURE (12)..(16): Lactam ring between side chains at positions 12 and 16
XSEGTFTSDYSKYLDERAAKDFVQWLMDT

SEQ ID NO: 454 - protein, 29 aa, Artificial Sequence
  Synthetic peptide
  MISC_FEATURE: c-term amidation
  MOD_RES (1)..(1): (Des-amino)His
  MISC_FEATURE (16)..(20): Lactam ring between side chains at positions 16 and 20
XSEGTFTSDYSKYLDKRAAEDFVQWLMDT

SEQ ID NO: 455 - protein, 29 aa, Artificial Sequence
  Synthetic peptide
  MISC_FEATURE: c-term amidation
  MOD_RES (1)..(1): (Des-amino)His
XSEGTFTSDYSKYLDEQAAKEFIAWLMDT

SEQ ID NO: 456 - protein, 29 aa, Artificial Sequence
  Synthetic peptide
  MISC_FEATURE: c-term amidation
  MOD_RES (1)..(1): (Des-amino)His
  MISC_FEATURE (12)..(16): Lactam ring between side chains at positions 12 and 16
XSEGTFTSDYSKYLDEQAAKEFIAWLMDT

SEQ ID NO: 457 - protein, 29 aa, Artificial Sequence
  Synthetic peptide
  MISC_FEATURE: c-term amidation
  MOD_RES (1)..(1): (Des-amino)His
  MISC_FEATURE (16)..(20): Lactam ring between side chains at positions 16 and 20
XSEGTFTSDYSKYLDEQAAKEFIAWLMDT

SEQ ID NO: 458 - protein, 29 aa, Artificial Sequence
  Synthetic peptide
  MISC_FEATURE: c-term amidation
  MOD_RES (2)..(2): Aminoisobutyric acid
HXEGTFTSDYSKYLDERRAQDFVQWLMDT

SEQ ID NO: 459 - protein, 29 aa, Artificial Sequence
  Synthetic peptide
  MISC_FEATURE: c-term amidation
  MOD_RES (2)..(2): Aminoisobutyric acid
HXEGTFTSDYSKYLDERRAKDFVQWLMDT

SEQ ID NO: 460 - protein, 29 aa, Artificial Sequence
  Synthetic peptide
  MISC_FEATURE: c-term amidation
  MOD_RES (2)..(2): Aminoisobutyric acid
  MISC_FEATURE (16)..(20): Lactam ring between side chains at positions 16 and 20
HXEGTFTSDYSKYLDERRAKDFVQWLMDT

SEQ ID NO: 461 - protein, 29 aa, Artificial Sequence
  Synthetic peptide
  MISC_FEATURE: c-term amidation
  MOD_RES (2)..(2): Aminoisobutyric acid
  MISC_FEATURE (12)..(16): Lactam ring between side chains at positions 12 and 16
HXEGTFTSDYSKYLDERRAQDFVQWLMDT

SEQ ID NO: 462 - protein, 29 aa, Artificial Sequence
  Synthetic peptide
  MISC_FEATURE: c-term amidation
  MOD_RES (2)..(2): Aminoisobutyric acid
  MISC_FEATURE (12)..(16): Lactam ring between side chains at positions 12 and 16
HXEGTFTSDYSKYLDERRAKDFVQWLMDT

SEQ ID NO: 463 - protein, 29 aa, Artificial Sequence
  Synthetic peptide
  MISC_FEATURE: c-term amidation
  MOD_RES (2)..(2): Aminoisobutyric acid
  MISC_FEATURE (16)..(20): Lactam ring between side chains at positions 16 and 20
HXEGTFTSDYSKYLDKRRAEDFVQWLMDT

SEQ ID NO: 464 - protein, 29 aa, Artificial Sequence
  Synthetic peptide
  MISC_FEATURE: c-term amidation
  MOD_RES (2)..(2): Aminoisobutyric acid
HXEGTFTSDYSKYLDERAAKDFVQWLMDT

SEQ ID NO: 465 - protein, 29 aa, Artificial Sequence
  Synthetic peptide
  MISC_FEATURE: c-term amidation
  MOD_RES (2)..(2): Aminoisobutyric acid
  MISC_FEATURE (16)..(20): Lactam ring between side chains at positions 16 and 20
HXEGTFTSDYSKYLDERAAKDFVQWLMDT

SEQ ID NO: 466 - protein, 29 aa, Artificial Sequence
  Synthetic peptide
  MISC_FEATURE: c-term amidation
  MOD_RES (2)..(2): Aminoisobutyric acid
  MISC_FEATURE (12)..(16): Lactam ring between side chains at postions 12 and 16
HXEGTFTSDYSKYLDERAAQDFVQWLMDT

SEQ ID NO: 467 - protein, 29 aa, Artificial Sequence
  Synthetic peptide
  MISC_FEATURE: c-term amidation
  MOD_RES (2)..(2): Aminoisobutyric acid
  MISC_FEATURE (12)..(16): Lactam ring between side chains at positions 12 and 16
HXEGTFTSDYSKYLDERAAKDFVQWLMDT

SEQ ID NO: 468 - protein, 29 aa, Artificial Sequence
  Synthetic peptide
  MISC_FEATURE: c-term amidation
  MOD_RES (2)..(2): Aminoisobutyric acid
  MISC_FEATURE (12)..(16): Lactam ring between side chains at positions 16 and 20
HXEGTFTSDYSKYLDKRAAEDFVQWLMDT

SEQ ID NO: 469 - protein, 29 aa, Artificial Sequence
  Synthetic peptide
  MISC_FEATURE: c-term amidation
  MOD_RES (2)..(2): Aminoisobutyric acid
HXEGTFTSDYSKYLDEQAAKEFIAWLMDT

SEQ ID NO: 470 - protein, 29 aa, Artificial Sequence
  Synthetic peptide
  MISC_FEATURE: c-term amidation
  MOD_RES (2)..(2): Aminoisobutyric acid
  MISC_FEATURE (12)..(16): Lactam ring between side chains at positions 12 and 16
HXEGTFTSDYSKYLDEQAAKEFIAWLMDT

SEQ ID NO: 471 - protein, 29 aa, Artificial Sequence
  Synthetic peptide
  MISC_FEATURE: c-term amidation
  MOD_RES (2)..(2): Aminoisobutyric acid
  MISC_FEATURE (16)..(20): Lactam ring between side chains at positions 16 and 20
HXEGTFTSDYSKYLDEQAAKEFIAWLMDT

SEQ ID NO: 472 - protein, 29 aa, Artificial Sequence
  Synthetic peptide
  MISC_FEATURE: c-term amidation
  MOD_RES (2)..(2): D-Ala
HXEGTFTSDYSKYLDERRAQDFVQWLMDT

SEQ ID NO: 473 - protein, 29 aa, Artificial Sequence
  Synthetic peptide
  MISC_FEATURE: c-term amidation
  MOD_RES (2)..(2): D-Ala
HXEGTFTSDYSKYLDERRAKDFVQWLMDT

SEQ ID NO: 474 - protein, 29 aa, Artificial Sequence
  Synthetic peptide
  MISC_FEATURE: c-term amidation
  MOD_RES (2)..(2): D-Ala
  MISC_FEATURE (16)..(20): Lactam ring between side chains at positions 16 and 20
HXEGTFTSDYSKYLDERRAKDFVQWLMDT

SEQ ID NO: 475 - protein, 29 aa, Artificial Sequence
  Synthetic peptide
  MISC_FEATURE: c-term amidation
  MOD_RES (2)..(2): D-Ala
  MISC_FEATURE (12)..(16): Lactam ring between side chains at positions 12 and 16
HXEGTFTSDYSKYLDERRAQDFVQWLMDT

SEQ ID NO: 476 - protein, 29 aa, Artificial Sequence
  Synthetic peptide
  MISC_FEATURE: c-term amidation
  MOD_RES (2)..(2): D-Ala
  MISC_FEATURE (12)..(16): Lactam ring between side chains at positions 12 and 16
HXEGTFTSDYSKYLDERRAKDFVQWLMDT

SEQ ID NO: 477 - protein, 29 aa, Artificial Sequence
  Synthetic peptide
  MISC_FEATURE: c-term amidation
  MOD_RES (2)..(2): D-Ala
  MISC_FEATURE (16)..(20): Lactam ring between side chains at positions 16 and 20
HXEGTFTSDYSKYLDKRRAEDFVQWLMDT

SEQ ID NO: 478 - protein, 29 aa, Artificial Sequence
  Synthetic peptide
  MISC_FEATURE: c-term amidation
  MOD_RES (2)..(2): D-Ala
HXEGTFTSDYSKYLDERAAKDFVQWLMDT

SEQ ID NO: 479 - protein, 29 aa, Artificial Sequence
  Synthetic peptide
  MISC_FEATURE: c-term amidation
  MOD_RES (2)..(2): D-Ala
  MISC_FEATURE (16)..(20): Lactam ring between side chains at positions 16 and 20
HXEGTFTSDYSKYLDERAAKDFVQWLMDT

SEQ ID NO: 480 - protein, 29 aa, Artificial Sequence
  Synthetic peptide
  MISC_FEATURE: c-term amidation
  MOD_RES (2)..(2): D-Ala
  MISC_FEATURE (12)..(16): Lactam ring between side chains at positions 12 and 16
HXEGTFTSDYSKYLDERAAQDFVQWLMDT

SEQ ID NO: 481 - protein, 29 aa, Artificial Sequence
  Synthetic peptide
  MISC_FEATURE: c-term amidation
  MOD_RES (2)..(2): D-Ala
  MISC_FEATURE (12)..(16): Lactam ring between side chains at positions 12 and 16
HXEGTFTSDYSKYLDERAAKDFVQWLMDT

SEQ ID NO: 482 - protein, 29 aa, Artificial Sequence
  Synthetic peptide
  MISC_FEATURE: c-term amidation
  MOD_RES (2)..(2): D-Ala
  MISC_FEATURE (16)..(20): Lactam ring between side chains at positions 16 and 20
HXEGTFTSDYSKYLDKRAAEDFVQWLMDT

SEQ ID NO: 483 - protein, 29 aa, Artificial Sequence
  Synthetic peptide
  MISC_FEATURE: c-term amidation
  MOD_RES (2)..(2): D-Ala
HXEGTFTSDYSKYLDEQAAKEFIAWLMDT

SEQ ID NO: 484 - protein, 29 aa, Artificial Sequence
  Synthetic peptide
  MISC_FEATURE: c-term amidation
  MOD_RES (2)..(2): D-Ala
  MISC_FEATURE (12)..(16): Lactam ring between side chains at positions 12 and 16
HXEGTFTSDYSKYLDEQAAKEFIAWLMDT

SEQ ID NO: 485 - protein, 29 aa, Artificial Sequence
  Synthetic peptide
  MISC_FEATURE: c-term amidation
  MOD_RES (2)..(2): D-Ala
  MISC_FEATURE (16)..(20): Lactam ring between side chains at positions 16 and 20
HXEGTFTSDYSKYLDEQAAKEFIAWLMDT

SEQ ID NO: 486 - protein, 29 aa, Artificial Sequence
  Synthetic peptide
  MISC_FEATURE: c-term amidation
  MOD_RES (2)..(2): Aminoisobutyric acid
  MOD_RES (24)..(24): Cys-PEG
HXQGTFTSDYSKYLDEQAAKEFICWLMNT

SEQ ID NO: 487 - protein, 29 aa, Artificial Sequence
  Synthetic peptide
  MISC_FEATURE: c-term amidation
  MOD_RES (2)..(2): Aminoisobutyric acid
  MOD_RES (29)..(29): Cys-PEG
HXQGTFTSDYSKYLDEQAAKEFIAWLMNC

SEQ ID NO: 488 - protein, 40 aa, Artificial Sequence
  Synthetic peptide
  MISC_FEATURE: c-term amidation
  MOD_RES (2)..(2): Aminoisobutyric acid
  MOD_RES (40)..(40): Cys-PEG
HXQGTFTSDYSKYLDEQAAKEFIAWLMNGGPSSGAPPPSC

SEQ ID NO: 489 - protein, 40 aa, Artificial Sequence; identical to SEQ ID NO: 488
  Synthetic peptide
  MISC_FEATURE: c-term amidation
  MOD_RES (2)..(2): Aminoisobutyric acid
  MISC_FEATURE (16)..(20): Lactam ring between side chains at positions 16 and 20
  MOD_RES (40)..(40): Cys-PEG

SEQ ID NO: 490 - protein, 39 aa, Artificial Sequence
  Synthetic peptide
  MISC_FEATURE: c-term amidation
  MOD_RES (2)..(2): Aminoisobutyric acid
  MOD_RES (24)..(24): Cys-PEG
HXQGTFTSDYSKYLDEQAAKEFICWLMNGGPSSGAPPPS

SEQ ID NO: 491 - protein, 39 aa, Artificial Sequence; identical to SEQ ID NO: 490
  Synthetic peptide
  MISC_FEATURE: c-term amidation
  MOD_RES (2)..(2): Aminoisobutyric acid
  MISC_FEATURE (16)..(20): Lactam ring between side chains at positions 16 and 20
  MOD_RES (24)..(24): Cys-PEG

SEQ ID NO: 492 - protein, 29 aa, Artificial Sequence
  Synthetic peptide
  MISC_FEATURE: c-term amidation
  MOD_RES (2)..(2): Aminoisobutyric acid
  MOD_RES (24)..(24): Cys-PEG
HXQGTFTSDYSKYLDERAAKDFVCWLMNT

SEQ ID NO: 493 - protein, 29 aa, Artificial Sequence
  Synthetic peptide
  MISC_FEATURE: c-term amidation
  MOD_RES (2)..(2): Aminoisobutyric acid
  MOD_RES (24)..(24): Cys-PEG
HXQGTFTSDYSKYLDERAAKDFVQWLMNC

SEQ ID NO: 494 - protein, 40 aa, Artificial Sequence
  Synthetic peptide
  MISC_FEATURE: c-term amidation
  MOD_RES (2)..(2): Aminoisobutyric acid
  MOD_RES (24)..(24): Cys-PEG
HXQGTFTSDYSKYLDERAAKDFVQWLMNGGPSSGAPPPSC

SEQ ID NO: 495 - protein, 40 aa, Artificial Sequence; identical to SEQ ID NO: 494
  Synthetic peptide
  MISC_FEATURE: c-term amidation
  MOD_RES (2)..(2): Aminoisobutyric acid
  MISC_FEATURE (16)..(20): Lactam ring between side chains at positions 16 and 20
  MOD_RES (40)..(40): Cys-PEG

SEQ ID NO: 496 - protein, 39 aa, Artificial Sequence
  Synthetic peptide
  MISC_FEATURE: c-term amidation
  MOD_RES (2)..(2): Aminoisobutyric acid
  MOD_RES (24)..(24): Cys-PEG
HXQGTFTSDYSKYLDERAAKDFVCWLMNGGPSSGAPPPS

SEQ ID NO: 497 - protein, 39 aa, Artificial Sequence; identical to SEQ ID NO: 496
  Synthetic peptide
  MISC_FEATURE: c-term amidation
  MOD_RES (2)..(2): Aminoisobutyric acid
  MISC_FEATURE (16)..(20): Lactam ring between side chains at positions 16 and 20
  MOD_RES (24)..(24): Cys-PEG

SEQ ID NO: 498 - protein, 30 aa, Artificial Sequence
  Synthetic peptide
  MISC_FEATURE: c-term amidation
  MOD_RES (2)..(2): Aminoisobutyric acid
  MOD_RES (24)..(24): Cys-PEG
HXQGTFTSDYSKYLDERRAKDFVCWLMNTA

SEQ ID NO: 499 - protein, 29 aa, Artificial Sequence
  Synthetic peptide
  MISC_FEATURE: c-term amidation
  MOD_RES (2)..(2): Aminoisobutyric acid
  MOD_RES (24)..(24): Cys-PEG
HXQGTFTSDYSKYLDERRAKDFVQWLMNC

SEQ ID NO: 500 - protein, 40 aa, Artificial Sequence
  Synthetic peptide
  MISC_FEATURE: c-term amidation
  MOD_RES (2)..(2): Aminoisobutyric acid
  MOD_RES (40)..(40): Cys-PEG
HXQGTFTSDYSKYLDERRAKDFVQWLMNGGPSSGAPPPSC

SEQ ID NO: 501 - protein, 40 aa, Artificial Sequence; identical to SEQ ID NO: 500
  Synthetic peptide
  MISC_FEATURE: c-term amidation
  MOD_RES (2)..(2): Aminoisobutyric acid
  MISC_FEATURE (16)..(20): Lactam ring between side chains at positions 16 and 20
  MOD_RES (40)..(40): Cys-PEG

SEQ ID NO: 502 - protein, 39 aa, Artificial Sequence
  Synthetic peptide
  MISC_FEATURE: c-term amidation
  MOD_RES (2)..(2): Aminoisobutyric acid
  MOD_RES (24)..(24): Cys-PEG
HXQGTFTSDYSKYLDERRAKDFVCWLMNGGPSSGAPPPS

SEQ ID NO: 503 - protein, 39 aa, Artificial Sequence; identical to SEQ ID NO: 502
  Synthetic peptide
  MISC_FEATURE: c-term amidation
  MOD_RES (2)..(2): Aminoisobutyric acid
  MISC_FEATURE (16)..(20): Lactam ring between side chains at positions 16 and 20
  MOD_RES (24)..(24): Cys-PEG

SEQ ID NO: 504 - protein, 29 aa, Artificial Sequence
  Synthetic peptide
  MISC_FEATURE: c-term amidation
  MOD_RES (2)..(2): Aminoisobutyric acid
  MISC_FEATURE (16)..(20): Lactam ring between side chains at positions 16 and 20
  MOD_RES (24)..(24): Cys-PEG
HXQGTFTSDYSKYLDEQAAKEFICWLMNT

SEQ ID NO: 505 - protein, 29 aa, Artificial Sequence
  Synthetic peptide
  MISC_FEATURE: c-term amidation
  MOD_RES (1)..(1): Alpha, Alpha-Dimethyl Imidiazole Acetic Acid
  MISC_FEATURE (16)..(20): Lactam ring between side chains at positions 16 and 20
  MOD_RES (24)..(24): Cys-PEG
XSQGTFTSDYSKYLDEQAAKEFICWLMNT

SEQ ID NO: 506 - protein, 29 aa, Artificial Sequence
  Synthetic peptide
  MISC_FEATURE: c-term amidation
  MOD_RES (1)..(1): Alpha, Alpha-Dimethly Imidiazole Acetic Acid
  MISC_FEATURE (16)..(20): Lactam ring between side chains at positions 16 and 20
  MOD_RES (29)..(29): Cys-PEG
XSQGTFTSDYSKYLDEQAAKEFIAWLMNC

SEQ ID NO: 507 - protein, 40 aa, Artificial Sequence
  Synthetic peptide
  MISC_FEATURE: c-term amidation
  MOD_RES (1)..(1): Alpha, Alpha Dimethyl Imidiazole Acetic Acid
  MISC_FEATURE (16)..(20): Lactam ring between side chains at positions 16 and 20
  MOD_RES (40)..(40): Cys-PEG
XSQGTFTSDYSKYLDEQAAKEFIAWLMNGGPSSGAPPPSC

SEQ ID NO: 508 - protein, 40 aa, Artificial Sequence
  Synthetic peptide
  MISC_FEATURE: c-term amidation
  MOD_RES (1)..(1): Alpha, Alpha Dimethyl Imidiazole Acetic Acid
  MISC_FEATURE (16)..(20): Lactam ring between side chains at positions 16 and 20
  MOD_RES (40)..(40): Cys-PEG
XSQGTFTSDYSKYLDERRAKDFVQWLMNGGPSSGAPPPSC

SEQ ID NO: 509 - protein, 39 aa, Artificial Sequence
  Synthetic peptide
  MISC_FEATURE: c-term amidation
  MOD_RES (1)..(1): Alpha, Alpha Dimethyl Imidiazole Acetic Acid
  MISC_FEATURE (16)..(20): Lactam ring between side chains at positions 16 and 20
  MOD_RES (24)..(24): Cys-PEG
XSQGTFTSDYSKYLDEQAAKEFICWLMNGGPSSGAPPPS

SEQ ID NO: 510 - protein, 29 aa, Artificial Sequence
  Synthetic peptide
  MISC_FEATURE: c-term amidation
  MOD_RES (1)..(1): Alpha, Alpha Dimethyl Imidiazole Acetic Acid
  misc_feature (2)..(2): Xaa can be any naturally occurring amino acid
  MISC_FEATURE (16)..(20): Lactam ring between side chains at positions 16 and 20
  MOD_RES (24)..(24): Cys-PEG
HXQGTFTSDYSKYLDERRAKDFVCWLMNT

SEQ ID NO: 511 - protein, 29 aa, Artificial Sequence
  Synthetic peptide
  MISC_FEATURE: c-term amidation
  MOD_RES (2)..(2): Alpha, Alpha Dimethyl Imidiazole Acetic Acid
  MISC_FEATURE (16)..(20): Lactam ring between side chains at positions 16 and 20
  MOD_RES (24)..(24): Cys-PEG
HXQGTFTSDYSKYLDERRAKDFVCWLMNT

SEQ ID NO: 512 - protein, 29 aa, Artificial Sequence
  Synthetic peptide
  MISC_FEATURE: c-term amidation
  MOD_RES (1)..(1): Alpha, Alpha Dimethyl Imidiazole Acetic Acid
  MISC_FEATURE (16)..(20): Lactam ring between side chains at positions 16 and 20
  MOD_RES (29)..(29): Cys-PEG
XSQGTFTSDYSKYLDERRAKDFVQWLMNC

SEQ ID NO: 513 - protein, 39 aa, Artificial Sequence
  Synthetic peptide
  MISC_FEATURE: c-term amidation
  MOD_RES (1)..(1): Alpha, Alpha Dimethyl Imidiazole Acetic Acid
  MISC_FEATURE (16)..(20): Lactam ring between side chains at positions 16 and 20
  MOD_RES (24)..(24): Cys-PEG
XSQGTFTSDYSKYLDERRAKDFVCWLMNGGPSSGAPPPS

SEQ ID NO: 514 - protein, 29 aa, Artificial Sequence
  Synthetic peptide
  MISC_FEATURE: c-term amidation
  MISC_FEATURE (16)..(20): Lactam ring between side chains at positions 16 and 20
  MOD_RES (24)..(24): Cys-PEG
HSQGTFTSDYSKYLDEQAAKEFICWLMNT

SEQ ID NO: 515 - protein, 11 aa, Artificial Sequence
  Synthetic peptide
GGPSSGAPPPS

SEQ ID NO: 516 - protein, 12 aa, Artificial Sequence
  Synthetic peptide
  MOD_RES (12)..(12): Cys-PEG
GGPSSGAPPPSC

SEQ ID NO: 517 - protein, 29 aa, Artificial Sequence
  Synthetic peptide
  MISC_FEATURE: c-term amidation
  MOD_RES (2)..(2): Aminoisobutyric acid
  MISC_FEATURE (16)..(20): Lactam ring between side chains at positions 16 and 20
  MOD_RES (24)..(24): Cys-PEG
HXQGTFTSDYSKYLDERRAKDFVCWLMNT

SEQ ID NO: 518 - protein, 29 aa, Artificial Sequence
  Synthetic peptide
  MISC_FEATURE: c-term amidation
  MOD_RES (24)..(24): Cys-PEG
HSQGTFTSDYSKYLDEQAAKEFICWLMNT

SEQ ID NO: 519 - protein, 29 aa, Artificial Sequence
  Synthetic peptide
  MISC_FEATURE: c-term amidation
  MOD_RES (1)..(1): Alpha, Alpha Dimethly Imidiazole Acetic Acid
  MOD_RES (24)..(24): Cys-PEG
XSQGTFTSDYSKYLDEQAAKEFICWLMNT

SEQ ID NO: 520 - protein, 29 aa, Artificial Sequence
  Synthetic peptide
  MISC_FEATURE: c-term amidation
  MOD_RES (1)..(1): Alpha, Alpha Dimethyl Imidiazole Acetic Acid
  MOD_RES (29)..(29): Cys-PEG
XSQGTFTSDYSKYLDEQAAKEFIAWLMNC

SEQ ID NO: 521 - protein, 39 aa, Artificial Sequence; identical to SEQ ID NO: 36
  Synthetic peptide
  MISC_FEATURE: c-term amidation

SEQ ID NO: 522 - protein, 39 aa, Artificial Sequence
  Synthetic peptide
  MISC_FEATURE: c-term amidation
HSQGTFTSDYSKYLDSRRAQDFVQWLMNGGPSSGAPPPS

SEQ ID NO: 523 - protein, 39 aa, Artificial Sequence
  Synthetic peptide
  MISC_FEATURE: c-term amidation
HSQGTFTSDYSKYLDSRRAQDFVQWLMKGGPSSGAPPPS

SEQ ID NO: 524 - protein, 39 aa, Artificial Sequence
  Synthetic peptide
  MISC_FEATURE: c-term amidation
HSQGTFTSDYSKYLDSRRAQDFVQWLVKGGPSSGAPPPS

SEQ ID NO: 525 - protein, 39 aa, Artificial Sequence
  Synthetic peptide
  MISC_FEATURE: c-term amidation
HSQGTFTSDYSKYLDSRRAQDFVQWLMDGGPSSGAPPPS

SEQ ID NO: 526 - protein, 39 aa, Artificial Sequence
  Synthetic peptide
  MISC_FEATURE: c-term amidation
HSQGTFTSDYSKYLDERRAKDFVQWLMDGGPSSGAPPPS

SEQ ID NO: 527 - protein, 30 aa, Artificial Sequence
  Synthetic peptide
  MISC_FEATURE: c-term amidation
HAEGTFTSDVSSYLEGQAAKEFIAWLVKGG

SEQ ID NO: 528 - protein, 29 aa, Artificial Sequence
  Synthetic peptide
  MISC_FEATURE: c-term amidation
  MOD_RES (2)..(2): Aminoisobutyric acid
  MISC_FEATURE (16)..(20): Lactam ring between side chains at positions 16 and 20
  MOD_RES (24)..(24): Cys-PEG
HXQGTFTSDYSKYLDERRAKDFVCWLMNT

SEQ ID NO: 529 - protein, 39 aa, Artificial Sequence; identical to SEQ ID NO: 513
  Synthetic peptide
  MISC_FEATURE: c-term amidation
  MOD_RES (1)..(1): Alpha, Alpha Dimethyl Imidiazole Acetic Acid
  MOD_RES (24)..(24): Cys-PEG

SEQ ID NO: 530 - protein, 29 aa, Artificial Sequence
  Synthetic peptide
  MISC_FEATURE: c-term amidation
  MOD_RES (1)..(1): Alpha, Alpha Dimethyl Imidiazole Acetic Acid
  MOD_RES (24)..(24): Cys-PEG
XSQGTFTSDYSKYLDERRAKDFVCWLMNT

SEQ ID NO: 531 - protein, 40 aa, Artificial Sequence
  Synthetic peptide
  MISC_FEATURE: c-term amidation
  MOD_RES (2)..(2): Aminoisobutyric acid
  MOD_RES (24)..(24): Cys-PEG
  MOD_RES (40)..(40): Cys-PEG
HXQGTFTSDYSKYLDERRAKEFICWLMNGGPSSGAPPPSC

SEQ ID NO: 532 - protein, 41 aa, Artificial Sequence
  Synthetic peptide
  MISC_FEATURE: c-term amidation
  MOD_RES (2)..(2): Aminoisobutyric acid
  MOD_RES (40)..(40): Cys-PEG
  MOD_RES (41)..(41): Cys-PEG
HXQGTFTSDYSKYLDEQAAKEFIAWLMNGGPSSGAPPPSCC

SEQ ID NO: 533 - protein, 39 aa, Artificial Sequence; identical to SEQ ID NO: 490
  Synthetic peptide
  MOD_RES (2)..(2): Aminoisobutyric acid
  MOD_RES (24)..(24): Cys-PEG
  MISC_FEATURE (24)..(24): c-term amidation

SEQ ID NO: 534 - protein, 29 aa, Artificial Sequence
  Synthetic peptide
  MISC_FEATURE: Chimera 2 AIB2 K10-C8 Cys 24-40K
  MISC_FEATURE: c-term amidation
  MOD_RES (2)..(2): Aminoisobutyric acid
  MOD_RES (10)..(10): Acylated with C8 fatty acid
  MOD_RES (24)..(24): Cys-PEG
HXQGTFTSDKSKYLDEQAAKEFICWLMNT

SEQ ID NO: 535 - protein, 29 aa, Artificial Sequence
  Synthetic peptide
  MISC_FEATURE: Chimera 2 AIB2 K10-C14 Cys 24-40K
  MISC_FEATURE: c-term amidation
  MOD_RES (2)..(2): Aminoisobutyric acid
  MOD_RES (10)..(10): Acylated with C14 fatty acid
  MOD_RES (24)..(24): Cys-PEG
HXQGTFTSDKSKYLDEQAAKEFICWLMNT

SEQ ID NO: 536 - protein, 29 aa, Artificial Sequence
  Synthetic peptide
  MISC_FEATURE: Chimera 2 AIB2 K10-C16 Cys24-40K
  MISC_FEATURE: c-term amidation
  MOD_RES (2)..(2): Aminoisobutyric acid
  MOD_RES (10)..(10): Acylated with C16 fatty acid
  MOD_RES (24)..(24): Cys-PEG
HXQGTFTSDKSKYLDEQAAKEFICWLMNT

SEQ ID NO: 537 - protein, 29 aa, Artificial Sequence
  Synthetic peptide
  MISC_FEATURE: Chimera 2 AIB2 K10-C18 Cys24-40K
  MISC_FEATURE: c-term amidation
  MOD_RES (2)..(2): Aminoisobutyric acid
  MOD_RES (10)..(10): Acylated with C18 fatty acid
  MOD_RES (24)..(24): Cys-PEG
HXQGTFTSDKSKYLDEQAAKEFICWLMNT

SEQ ID NO: 538 - protein, 29 aa, Artificial Sequence
  Synthetic peptide
  MISC_FEATURE: Chimera 2 K10-C18 Cys24-40K
  MISC_FEATURE: c-term amidation
  MOD_RES (10)..(10): Acylated with C18 fatty acid
  MOD_RES (24)..(24): Cys-PEG
HSQGTFTSDKSKYLDEQAAKEFICWLMNT

SEQ ID NO: 539 - protein, 29 aa, Artificial Sequence
  Synthetic peptide
  MISC_FEATURE: Glucagon E16 K20 K10-C18 Cys24-40K
  MOD_RES (10)..(10): Acylated with C18 fatty acid
  MOD_RES (24)..(24): Cys-PEG
HSQGTFTSDKSKYLDERRAKDFVCWLMNT

SEQ ID NO: 540 - protein, 29 aa, Artificial Sequence
  Synthetic peptide
  MISC_FEATURE: Glucagon E16 K20 K10-W-C18
  MISC_FEATURE: c-term amidation
  MOD_RES (10)..(10): Covalently bound to Trp residue comprising a C18 fatty acid
HSQGTFTSDKSKYLDERRAKDFVQWLMNT

SEQ ID NO: 541 - protein, 29 aa, Artificial Sequence
  Synthetic peptide
  MISC_FEATURE: Glucagon E16 K20 K10-W-C16 Cys24-40K
  MOD_RES (10)..(10): Covalently bound to Trp residue comprising a C16 fatty acid
  MOD_RES (24)..(24): Cys-PEG
HSQGTFTSDKSKYLDERRAKDFVCWLMNT

SEQ ID NO: 542 - protein, 29 aa, Artificial Sequence
  Synthetic peptide
  MISC_FEATURE: Glucagon E16 K20 K10-C16
  MISC_FEATURE: c-term amidation
  MOD_RES (10)..(10): Covalently bound to C16 fatty acid
HSQGTFTSDKSKYLDERRAKDFVQWLMNT

SEQ ID NO: 543 - protein, 29 aa, Artificial Sequence
  Synthetic peptide
  MISC_FEATURE: Glucagon E16 K20 K10-C16
  MISC_FEATURE: c-term amidation
  MOD_RES (10)..(10): Covalently bound to Trp residue comprising a C16 fatty acid
HSQGTFTSDKSKYLDERRAKDFVQWLMNT

SEQ ID NO: 544 - protein, 29 aa, Artificial Sequence
  Synthetic peptide
  MISC_FEATURE: Glucagon E16 K20 K10-C18
  MISC_FEATURE: c-term amidation
  MOD_RES (10)..(10): Covalently bound to C18 fatty acid
HSQGTFTSDKSKYLDERRAKDFVQWLMNT

SEQ ID NO: 545 - protein, 29 aa, Artificial Sequence
  Synthetic peptide
  MISC_FEATURE: Glucagon E16 K20
  MISC_FEATURE: c-term amidation
HSQGTFTSDYSKYLDERRAKDFVQWLMNT

SEQ ID NO: 546 - protein, 29 aa, Artificial Sequence
  Synthetic peptide
  MISC_FEATURE: Glucagon E16 K20 K10-W-C16 Cys 24-40K
  MISC_FEATURE: c-term amidation
  MOD_RES (10)..(10): Covalently bound to Trp residue comprising C16 fatty acid
  MOD_RES (24)..(24): Cys-PEG
HSQGTFTSDKSKYLDERRAKDFVCWLMNT

SEQ ID NO: 547 - protein, 29 aa, Artificial Sequence
  Synthetic peptide
  MISC_FEATURE: Glucagon E16 K20 K10-C18 Cys24-40K
  MISC_FEATURE: c-term amidation
  MOD_RES (10)..(10): Covalently bound to C18 fatty acid
  MOD_RES (24)..(24): Cys-PEG
HSQGTFTSDKSKYLDERRAKDFVCWLMNT

SEQ ID NO: 548 - protein, 29 aa, Artificial Sequence
  Synthetic peptide
  MISC_FEATURE: Glucagon E16 K20 K10-C18 Cys24-40K
  MISC_FEATURE: c-term amidation
  MOD_RES (10)..(10): Covalently bound to Trp residue comprising a C18 fatty acid
  MOD_RES (24)..(24): Cys-PEG
HSQGTFTSDKSKYLDERRAKDFVCWLMNT

SEQ ID NO: 549 - protein, 29 aa, Artificial Sequence
  Synthetic peptide
  MISC_FEATURE: Glucagon E16 K20 K10-C16 amide
  MISC_FEATURE: c-term amidation
  MOD_RES (10)..(10): Covalently bound to Glu residue comprising a C16 fatty acid
  MOD_RES (24)..(24): Cys-PEG
HSQGTFTSDKSKYLDERRAQDFVCWLMNT

SEQ ID NO: 550 - protein, 28 aa, Artificial Sequence
  Synthetic peptide
  MISC_FEATURE: Chimera 2 truncated by one amino acid
HSQGTFTSDYSKYLDEQAAKEFIAWLMN

SEQ ID NO: 551 - protein, 27 aa, Artificial Sequence
  Synthetic peptide
  MISC_FEATURE: Chimera 2 truncated by two amino acids
HSQGTFTSDYSKYLDEQAAKEFIAWLM

SEQ ID NO: 552 - protein, 28 aa, Artificial Sequence
  Synthetic peptide
  MISC_FEATURE: aa 1-28, E16 K20 C-terminal amide
  MISC_FEATURE: c-term amidation
HSQGTFTSDYSKYLDERRAKDFVQWLMN

SEQ ID NO: 553 - protein, 27 aa, Artificial Sequence
  Synthetic peptide
  MISC_FEATURE: aa 1-27 E16 K20 C-terminal amide
  MISC_FEATURE: c-term amidation
HSQGTFTSDYSKYLDERRAKDFVQWKM

SEQ ID NO: 554 - protein, 29 aa, Artificial Sequence
  Synthetic peptide
  MISC_FEATURE: c-term amidation
  MOD_RES (27)..(27): Norleucine
HSEGTFTSDYSKYLDEQAAKEFIAWLXNT

SEQ ID NO: 555 - protein, 39 aa, Artificial Sequence
  Synthetic peptide
  MISC_FEATURE (16)..(20): Lactam bridging side chains at positions 16 and 20
YSQGTFTSDYSKYLDEQAAKEFVNWLMNGGPSSGAPPPS

SEQ ID NO: 556 - protein, 29 aa, Artificial Sequence
  Synthetic peptide
  MISC_FEATURE: Chimera 2 with AIB at 16
  MISC_FEATURE: c-term amidation
  MOD_RES (16)..(16): Aminoisobutyric acid
HSQGTFTSDYSKYLDXQAAKEFIAWLMNT

SEQ ID NO: 557 - protein, 29 aa, Artificial Sequence
  Synthetic peptide
  MISC_FEATURE: c-term amidation
  MOD_RES (2)..(2): Aminoisobutyric acid
  MOD_RES (16)..(16): Aminoisobutyric acid
HXQGTFTSDYSKYLDXRRAQDFVQWLMNT

SEQ ID NO: 558 - protein, 29 aa, Artificial Sequence
  Synthetic peptide
  MISC_FEATURE: c-term amidation
  MOD_RES (2)..(2): Aminoisobutyric acid
  MISC_FEATURE (10)..(10): Covalently bound to Trp residue comprising a C16 fatty acid
  MOD_RES (16)..(16): Aminoisobutyric acid
  MOD_RES (24)..(24): Cys-PEG
HXQGTFTSDKSKYLDXRRAQDFVCWLMNT

SEQ ID NO: 559 - protein, 29 aa, Artificial Sequence
  Synthetic peptide
  MISC_FEATURE: c-term amidation
  MOD_RES (2)..(2): Aminoisobutric Acid
  MISC_FEATURE (10)..(10): Covalently bound to Trp residue comprising a C16 fatty acid
  MOD_RES (16)..(16): Aminoisobutric Acid
HXQGTFTSDKSKYLDXRRAQDFVCWLMNT

SEQ ID NO: 560 - protein, 29 aa, Artificial Sequence
  Synthetic peptide
  MISC_FEATURE: c-term amidation
  MOD_RES (2)..(2): Aminoisobutyric acid
  MISC_FEATURE (10)..(10): Covalently bound to Trp residue comprising a C16 fatty acid
  MOD_RES (16)..(16): Aminoisobutyric acid
  MOD_RES (20)..(20): Aminoisobutyric acid
  MOD_RES (24)..(24): Cys-PEG
HXQGTFTSDKSKYLDXRRAXDFVCWLMNT

SEQ ID NO: 561 - protein, 29 aa, Artificial Sequence
  Synthetic peptide
  MISC_FEATURE: c-term amidation
  MOD_RES (2)..(2): Aminoisobutyric acid
  MISC_FEATURE (10)..(10): Covalently bound to Trp residue comprising a C16 fatty acid
  MOD_RES (16)..(16): Aminoisobutyric acid
  MOD_RES (20)..(20): Aminoisobutyric acid
HXQGTFTSDKSKYLDXRRAXDFVCWLMNT

SEQ ID NO: 562 - protein, 29 aa, Artificial Sequence
  Synthetic peptide
  MISC_FEATURE: c-term amidation
  MOD_RES (2)..(2): Aminoisobutyric acid
  MOD_RES (16)..(16): Aminoisobutyric acid
HXQGTFTSDKSKYLDXRRAQDFVQWLMNT

SEQ ID NO: 563 - protein, 29 aa, Artificial Sequence
  Synthetic peptide
  MISC_FEATURE: c-term amidation
  MOD_RES (2)..(2): Aminoisobutyric Acid
  MOD_RES (10)..(10): Acylated with a C16 fatty acyl group
  MOD_RES (16)..(16): Aminoisobutyric Acid
HXQGTFTSDKSKYLDXRRAQDFVQWLMNT

SEQ ID NO: 564 - protein, 29 aa, Artificial Sequence
  Synthetic peptide
  MISC_FEATURE: c-term amidation
  MOD_RES (2)..(2): Aminoisobutyric Acid
  MOD_RES (10)..(10): Acylated with a C16 fatty acyl group via Ala-Ala spacer
  MOD_RES (16)..(16): Aminoisobutyric Acid
HXQGTFTSDKSKYLDXRRAQDFVQWLMNT

SEQ ID NO: 565 - protein, 29 aa, Artificial Sequence
  Synthetic peptide
  MISC_FEATURE: c-term amidation
  MOD_RES (2)..(2): Aminoisobutryic Acid
  MOD_RES (10)..(10): Acylated with a C16 fatty acyl group via gamma-Glu-gamma-Glu spacer
  MOD_RES (16)..(16): Aminoisobutryic Acid
HXQGTFTSDKSKYLDXRRAQDFVQWLMNT

SEQ ID NO: 566 - protein, 29 aa, Artificial Sequence
  Synthetic peptide
  MISC_FEATURE: c-term amidation
  MOD_RES (2)..(2): Aminoisobutryic Acid
  MOD_RES (10)..(10): Acylated with a C16 fatty acyl group via beta-Ala-beta-Ala spacer
  MOD_RES (16)..(16): Aminoisobutryic Acid
HXQGTFTSDKSKYLDXRRAQDFVQWLMNT

SEQ ID NO: 567 - protein, 29 aa, Artificial Sequence
  Synthetic peptide
  MISC_FEATURE: c-term amidation
  MOD_RES (2)..(2): Aminoisobutryic Acid
  MOD_RES (10)..(10): Acylated with a C16 fatty acyl group via 6-aminohexanoic acid spacer
  MOD_RES (16)..(16): Aminoisobutryic Acid
HXQGTFTSDKSKYLDXRRAQDFVQWLMNT

SEQ ID NO: 568 - protein, 29 aa, Artificial Sequence
  Synthetic peptide
  MISC_FEATURE: c-term amidation
  MOD_RES (2)..(2): Aminoisobutryic Acid
  MOD_RES (10)..(10): Acylated with a C16 fatty acyl group via Leu-Leu spacer
  MOD_RES (16)..(16): Aminoisobutryic Acid
HXQGTFTSDKSKYLDXRRAQDFVQWLMNT

SEQ ID NO: 569 - protein, 29 aa, Artificial Sequence
  Synthetic peptide
  MISC_FEATURE: c-term amidation
  MOD_RES (2)..(2): Aminoisobutryic Acid
  MOD_RES (10)..(10): Acylated with a C16 fatty acyl group via Pro-Pro spacer
  MOD_RES (16)..(16): Aminoisobutryic Acid
HXQGTFTSDKSKYLDXRRAQDFVQWLMNT

SEQ ID NO: 570 - protein, 29 aa, Artificial Sequence
  Synthetic peptide
  MISC_FEATURE: c-term amidation
  MOD_RES (2)..(2): Aminoisobutyric Acid
  MOD_RES (10)..(10): Acylated with a C14 fatty acyl group
  MOD_RES (16)..(16): Aminoisobutyric Acid
  MOD_RES (24)..(24): Pegylated
HXQGTFTSDKSKYLDXRRAQDFVCWLMNT

SEQ ID NO: 571 - protein, 29 aa, Artificial Sequence
  Synthetic peptide
  MISC_FEATURE: c-term amidation
  MOD_RES (2)..(2): Aminoisobutyric Acid
  MOD_RES (10)..(10): Acylated with a C14 fatty acyl group via gamma-Glu-gamma-Glu spacer
  MOD_RES (16)..(16): Aminoisobutyric Acid
  MOD_RES (24)..(24): Pegylated
HXQGTFTSDKSKYLDXRRAQDFVCWLMNT

SEQ ID NO: 572 - protein, 29 aa, Artificial Sequence
  Synthetic peptide
  MISC_FEATURE: c-term amidation
  MOD_RES (2)..(2): Aminoisobutryic Acid
  MOD_RES (10)..(10): Acylated with a C14 fatty acyl group via gamma-Glu-gamma-Glu spacer
  MOD_RES (16)..(16): Aminoisobutryic Acid
HXQGTFTSDKSKYLDXRRAQDFVQWLMNT

SEQ ID NO: 573 - protein, 29 aa, Artificial Sequence
  Synthetic peptide
  MISC_FEATURE: c-term amidation
  MOD_RES (2)..(2): Aminoisobutryic Acid
  MOD_RES (10)..(10): Acylated with a C14 fatty acyl group via Ala-Ala spacer
  MOD_RES (16)..(16): Aminoisobutryic Acid
  MOD_RES (24)..(24): Pegylated
HXQGTFTSDKSKYLDXRRAQDFVCWLMNT

SEQ ID NO: 574 - protein, 29 aa, Artificial Sequence
  Synthetic peptide
  MISC_FEATURE: c-term amidation
  MOD_RES (2)..(2): Aminoisobutryic Acid
  MOD_RES (10)..(10): Acylated with a C14 fatty acyl group via Ala-Ala spacer
  MOD_RES (16)..(16): Aminoisobutryic Acid
HXQGTFTSDKSKYLDXRRAQDFVQWLMNT

SEQ ID NO: 575 - protein, 29 aa, Artificial Sequence
  Synthetic peptide
  MISC_FEATURE: c-term amidation
  MOD_RES (2)..(2): Aminoisobutryic acid
  MOD_RES (10)..(10): Acylated with a C16 fatty acyl group via Ala-Ala spacer
  MOD_RES (16)..(16): Aminoisobutryic acid
  MOD_RES (24)..(24): Pegylated
HXQGTFTSDKSKYLDXRRAQDFVCWLMNT

SEQ ID NO: 576 - protein, 29 aa, Artificial Sequence
  Synthetic peptide
  MISC_FEATURE: c-term amidation
  MOD_RES (2)..(2): Aminoisobutryic Acid
  MOD_RES (10)..(10): Acylated with a C16 fatty acyl group via gamma-Glu-gamma-Glu spacer
  MOD_RES (16)..(16): Aminoisobutryic Acid
  MOD_RES (24)..(24): Pegylated
HXQGTFTSDKSKYLDXRRAQDFVCWLMNT

SEQ ID NO: 577 - protein, 29 aa, Artificial Sequence
  Synthetic peptide
  MISC_FEATURE: c-term amidation
  MOD_RES (10)..(10): Acylated with a C16 fatty acyl group
HSQGTFTSDKSKYLDSRRAQDFVQWLMNT

SEQ ID NO: 578 - protein, 29 aa, Artificial Sequence
  Synthetic peptide
  MISC_FEATURE: c-term amidation
  MOD_RES (10)..(10): Acylated with a C16 fatty acyl group via gamma-Glu-gamma-Glu spacer
HSQGTFTSDKSKYLDSRRAQDFVQWLMNT

SEQ ID NO: 579 - protein, 29 aa, Artificial Sequence
  Synthetic peptide
  MISC_FEATURE: AA-C16 Glucagon Amide
  MISC_FEATURE: c-term amidation
  MOD_RES (10)..(10): Acylated with a C16 fatty acyl group via Ala-Ala spacer
HSQGTFTSDKSKYLDSRRAQDFVQWLMNT

SEQ ID NO: 580 - protein, 29 aa, Artificial Sequence
  Synthetic peptide
  MISC_FEATURE: Chimera 2, AIB2, Lys10, Cys24-PEG
  MISC_FEATURE: c-term amidation
  MOD_RES (2)..(2): Aminoisobutryic Acid
  MOD_RES (24)..(24): Pegylated
HXQGTFTSDKSKYLDEQAAKEFICWLMNT

SEQ ID NO: 581 - protein, 30 aa, Artificial Sequence
  Synthetic peptide
  MISC_FEATURE: Peptide dS2E16K20K30-C14 Gluc Amide
  MISC_FEATURE: c-term amidation
  MOD_RES (2)..(2): Xaa is d-Ser
  MOD_RES (30)..(30): Acylated with a C14 fatty acyl group
HXQGTFTSDYSKYLDERRAKDFVQWLMNTK

SEQ ID NO: 582 - protein, 29 aa, Artificial Sequence
  Synthetic peptide
  MISC_FEATURE: Peptide dS2K10(C14)E16K20-Gluc Amide
  MISC_FEATURE: c-term amidation
  MOD_RES (2)..(2): Xaa is d-Ser
  MOD_RES (10)..(10): Acylated with a C14 fatty acyl group
HXQGTFTSDKSKYLDERRAKDFVQWLMNT

SEQ ID NO: 583 - protein, 30 aa, Artificial Sequence; identical to SEQ ID NO: 581
  Synthetic peptide
  MISC_FEATURE: Peptide dS2E16K20K30-C16 Gluc Amide
  MISC_FEATURE: c-term amidation
  MOD_RES (2)..(2): Xaa is d-Ser
  MOD_RES (30)..(30): Acylated with a C16 fatty acyl group

SEQ ID NO: 584 - protein, 29 aa, Artificial Sequence
  Synthetic peptide
  MISC_FEATURE: Peptide dS2K10(C16)E16K20-Gluc Amide
  MISC_FEATURE: c-term amidation
  MOD_RES (2)..(2): Xaa is d-Ser
  MOD_RES (10)..(10): Acylated with a C16 fatty acyl group
HXQGTFTSDKSKYLDERRAKDFVQWLMNT

SEQ ID NO: 585 - protein, 29 aa, Artificial Sequence
  Synthetic peptide
  MISC_FEATURE: Peptide Chimera 2-AIB2-K10-acylated
  MISC_FEATURE: c-term amidation
  MOD_RES (2)..(2): Aminoisobutryic Acid
  MOD_RES (10)..(10): Acylated with a C18 fatty acyl group
  MOD_RES (24)..(24): Pegylated
HXQGTFTSDKSKYLDEQAAKEFICWLMNT

SEQ ID NO: 586 - protein, 30 aa, Artificial Sequence
  Synthetic peptide
  MISC_FEATURE: Peptide Chimera 2-AIB2-K30-acylated
  MISC_FEATURE: c-term amidation
  MOD_RES (2)..(2): Aminoisobutryic Acid
  MOD_RES (24)..(24): Pegylated
  MOD_RES (30)..(30): Acylated with a C18 fatty acyl group
HXQGTFTSDYSKYLDEQAAKEFICWLMNTK

SEQ ID NO: 587 - protein, 29 aa, Artificial Sequence
  Synthetic peptide
  MISC_FEATURE: c-term amidation
  MOD_RES (1)..(1): DMIA
XSQGTFTSDYSKYLDERRAKDFVCWLMNT

SEQ ID NO: 588 - protein, 29 aa, Artificial Sequence
  Synthetic peptide
  MISC_FEATURE: c-term amidation
  MOD_RES (1)..(1): DMIA
  MOD_RES (16)..(20): Lactam ring between side chains of amino acids at positions 16 and 20
XSQGTFTSDYSKYLDERRAKDFVCWLMNT

SEQ ID NO: 589 - protein, 29 aa, Artificial Sequence
  Synthetic peptide
  MISC_FEATURE: c-term amidation
  MOD_RES (2)..(2): Aminoisobutryic Acid
HXEGTFTSDYSKYLDEQAAKEFICWLMNT

SEQ ID NO: 590 - protein, 29 aa, Artificial Sequence
  Synthetic peptide
  MISC_FEATURE: c-term amidation
  MOD_RES (2)..(2): Aminoisobutryic Acid
  MOD_RES (24)..(24): Pegylated
HXEGTFTSDYSKYLDEQAAKEFICWLMNT

SEQ ID NO: 591 - protein, 29 aa, Artificial Sequence
  Synthetic peptide
  MOD_RES (3)..(3): Xaa is a Glutamine analog
  MOD_RES (27)..(27): Xaa is Norleucine
HSXGTFTSDYSKYLDTRRAAEFVAWLXDE

SEQ ID NO: 592 - protein, 29 aa, Artificial Sequence
  Synthetic peptide
  MOD_RES (3)..(3): Xaa is a Glutamine analog
  MOD_RES (16)..(16): Xaa is Aib
HSXGTFTSDYSKYLDXRRAADFVAWLMDE

SEQ ID NO: 593 - protein, 29 aa, Artificial Sequence
  Synthetic peptide
  MOD_RES (27)..(27): Xaa is Norleucine
HSQGTFTSDYSKYLDTRRAAEFVAWLXDE

SEQ ID NO: 594 - protein, 29 aa, Artificial Sequence
  Synthetic peptide
  MOD_RES (3)..(3): Xaa is Acetamidomethyl-cysteine
  MOD_RES (27)..(27): Xaa is Norleucine
HSXGTFTSDYSKYLDTRRAAEFVAWLXDE

SEQ ID NO: 595 - protein, 29 aa, Artificial Sequence
  Synthetic peptide
  MOD_RES (3)..(3): Xaa is Acetyldiaminobutanoic acid
  MOD_RES (27)..(27): Xaa is Norleucine
HSXGTFTSDYSKYLDTRRAAEFVAWLXDE

SEQ ID NO: 596 - protein, 29 aa, Artificial Sequence
  Synthetic peptide
  MOD_RES (3)..(3): Xaa is carbamoyldiaminopropanoic acid
  MOD_RES (27)..(27): Xaa is Norleucine
HSXGTFTSDYSKYLDTRRAAEFVAWLXDE

SEQ ID NO: 597 - protein, 29 aa, Artificial Sequence
  Synthetic peptide
  MOD_RES (3)..(3): Xaa is Methylglutamine
  MOD_RES (27)..(27): Xaa is Norleucine
HSXGTFTSDYSKYLDTRRAAEFVAWLXDE

SEQ ID NO: 598 - protein, 29 aa, Artificial Sequence
  Synthetic peptide
  MOD_RES (3)..(3): Xaa is Methionine sulfoxide
  MOD_RES (27)..(27): Xaa is Norleucine
HSXGTFTSDYSKYLDTRRAAEFVAWLXDE

SEQ ID NO: 599 - protein, 29 aa, Artificial Sequence
  Synthetic peptide
  MOD_RES (3)..(3): Acetylornithine
  MOD_RES (27)..(27): Xaa is Norleucine
HSXGTFTSDYSKYLDTRRAAEFVAWLXDE

SEQ ID NO: 600 - protein, 29 aa, Artificial Sequence
  Synthetic peptide
  MOD_RES (16)..(16): Xaa is Aminoisobutryic Acid
HSQGTFTSDYSKYLDXRRAADFVAWLMDE

SEQ ID NO: 601 - protein, 29 aa, Artificial Sequence
  Synthetic peptide
  MOD_RES (3)..(3): Xaa is Acetyldiaminobutanoic acid
  MOD_RES (16)..(16): Xaa is Aminoisobutyric Acid
HSXGTFTSDYSKYLDXRRAADFVAWLMDE

SEQ ID NO: 602 - protein, 29 aa, Artificial Sequence
  Synthetic peptide
  MOD_RES (3)..(3): Xaa is Methylglutamine
  MOD_RES (16)..(16): Xaa is Aminoisobutyric Acid
HSXGTFTSDYSKYLDXRRAADFVAWLMDE

SEQ ID NO: 603 - protein, 29 aa, Artificial Sequence
  Synthetic peptide
  MOD_RES (3)..(3): Xaa is Acetyldiaminobutanoic acid
  MOD_RES (16)..(16): Xaa is Aminoisobutryic Acid
HSXGTFTSDYSKYLDXRRAADFVAWLLDE

SEQ ID NO: 604 - protein, 39 aa, Artificial Sequence
  Synthetic peptide
  MISC_FEATURE: c-term amidation
  MOD_RES (3)..(3): Xaa is Acetyldiaminobutanoic acid
  MOD_RES (16)..(16): Xaa is Aminoisobutyric Acid
HSXGTFTSDYSKYLDXRRAADFVAWLLDTGPSSGAPPPS

SEQ ID NO: 605 - protein, 29 aa, Artificial Sequence
  Synthetic peptide
  MOD_RES (3)..(3): Xaa is Acetyldiaminobutanoic acid
  MOD_RES (16)..(16): Xaa is Aminoisobutryic Acid
HSXGTFTSDYSKYLDXRRASDFVSWLLDE

SEQ ID NO: 606 - protein, 29 aa, Artificial Sequence
  Synthetic peptide
  MOD_RES (3)..(3): Xaa is Acetyldiaminobutanoic acid
  MOD_RES (16)..(16): Xaa is Aminoisobutryic Acid
HSXGTFTSDYSKYLDXRRATDFVTWLLDE

SEQ ID NO: 607 - protein, 29 aa, Artificial Sequence
  Synthetic peptide
  MISC_FEATURE: c-term amidation
  MOD_RES (1)..(1): Xaa is Dmia
  MOD_RES (10)..(10): Covalently bound to a C14 fatty acyl group
  MOD_RES (16)..(20): Lactam ring between side chains of amino acids at positions 16 and 20
XSQGTFTSDKSKYLDERRAKDFVQWLMNT

SEQ ID NO: 608 - protein, 29 aa, Artificial Sequence
  Synthetic peptide
  MISC_FEATURE: c-term amidation
  MOD_RES (1)..(1): DMIA
  MOD_RES (10)..(10): Covalently bound to C16 fatty acyl group
  MOD_RES (16)..(20): Lactam ring between side chains of amino acids at positions 16 and 20
XSQGTFTSDKSKYLDERRAKDFVQWLMNT

SEQ ID NO: 609 - protein, 29 aa, Artificial Sequence
  Synthetic peptide
  MISC_FEATURE: c-term amidation
  MOD_RES (1)..(1): DMIA
  MOD_RES (10)..(10): Covalently bound to C18 fatty acyl group
  MOD_RES (16)..(20): Lactam ring between side chains of amino acids at positions 16 and 20
XSQGTFTSDKSKYLDERRAKDFVQWLMNT

SEQ ID NO: 610 - protein, 29 aa, Artificial Sequence
  Synthetic peptide
  MISC_FEATURE: c-term amidation
  MOD_RES (2)..(2): Aminoisobutryic Acid
  MOD_RES (10)..(10): Covalently bound to C14 fatty acyl group
  MOD_RES (16)..(16): Aminoisobutryic Acid
HXQGTFTSDKSKYLDXRRAQDFVQWLMNT

SEQ ID NO: 611 - protein, 29 aa, Artificial Sequence
  Synthetic peptide
  MISC_FEATURE: c-term amidation
  MOD_RES (2)..(2): Aminoisobutryic Acid
  MOD_RES (10)..(10): Covalently bound to C16 fatty acyl group
  MOD_RES (16)..(16): Aminoisobutryic Acid
HXQGTFTSDKSKYLDXRRAQDFVQWLMNT

SEQ ID NO: 612 - protein, 29 aa, Artificial Sequence
  Synthetic peptide
  MISC_FEATURE: c-term amidation
  MOD_RES (2)..(2): Aminoisobutryic Acid
  MOD_RES (10)..(10): Covalently bound to C18 fatty acyl group
  MOD_RES (16)..(16): Aminoisobutryic Acid
HXQGTFTSDKSKYLDXRRAQDFVQWLMNT

SEQ ID NO: 613 - protein, 29 aa, Artificial Sequence
  Synthetic peptide
  MISC_FEATURE: c-term amidation
  MOD_RES (2)..(2): Xaa is d-Ser
  MOD_RES (10)..(10): Covalently bound to C14 fatty acyl group
HXQGTFTSDKSKYLDERRAKDFVQWLMNT

SEQ ID NO: 614 - protein, 29 aa, Artificial Sequence
  Synthetic peptide
  MISC_FEATURE: c-term amidation
  MOD_RES (2)..(2): Xaa is d-Ser
  MOD_RES (10)..(10): Covalently bound to C16 fatty acyl group
HXQGTFTSDKSKYLDERRAKDFVQWLMNT

SEQ ID NO: 615 - protein, 29 aa, Artificial Sequence
  Synthetic peptide
  MISC_FEATURE: c-term amidation
  MOD_RES (2)..(2): Xaa is d-Ser
  MOD_RES (10)..(10): Covalently bound to a C18 fatty acyl group
HXQGTFTSDKSKYLDERRAKDFVQWLMNT

SEQ ID NO: 616 - protein, 29 aa, Artificial Sequence
  Synthetic peptide
  MISC_FEATURE: c-term amidation
  MOD_RES (2)..(2): Aminoisobutyric Acid
  MOD_RES (10)..(10): Covalently bound to a C14 fatty acyl group
  MOD_RES (16)..(16): Aminoisobutyric Acid
HXQGTFTSDKSKYLDXRRAQDFVCWLMNT

SEQ ID NO: 617 - protein, 29 aa, Artificial Sequence
  Synthetic peptide
  MISC_FEATURE: c-term amidation
  MOD_RES (2)..(2): Aminoisobutryic Acid
  MOD_RES (10)..(10): Covalently bound to C14 fatty acyl group via gamma-Glu-gamma-Glu spacer
  MOD_RES (16)..(16): Aminoisobutryic Acid
HXQGTFTSDKSKYLDXRRAQDFVCWLMNT

SEQ ID NO: 618 - protein, 29 aa, Artificial Sequence
  Synthetic peptide
  MISC_FEATURE: c-term amidation
  MOD_RES (2)..(2): Aminoisobutryic Acid
  MOD_RES (10)..(10): Covalently bound to C14 fatty acyl group via Ala-Ala spacer
  MOD_RES (16)..(16): Aminoisobutryic Acid
HXQGTFTSDKSKYLDXRRAQDFVCWLMNT

SEQ ID NO: 619 - protein, 29 aa, Artificial Sequence
  Synthetic peptide
  MISC_FEATURE: c-term amidation
  MOD_RES (2)..(2): Aminoisobutyric Acid
  MOD_RES (10)..(10): Covalently bound to C16 fatty acyl group via di peptide spacer
  MOD_RES (16)..(16): Aminoisobutyric Acid
HXQGTFTSDKSKYLDXRRAQDFVCWLMNT

SEQ ID NO: 620 - protein, 29 aa, Artificial Sequence
  Synthetic peptide
  MISC_FEATURE: c-term amidation
  MOD_RES (2)..(2): Aminoisobutyric Acid
  MOD_RES (10)..(10): Covelently bound to C16 fatty acyl group via Ala-Ala spacer
  MOD_RES (16)..(16): Aminoisobutyric Acid
HXQGTFTSDKSKYLDXRRAQDFVCWLMNT

SEQ ID NO: 621 - protein, 29 aa, Artificial Sequence
  Synthetic peptide
  MISC_FEATURE: c-term amidation
  MOD_RES (2)..(2): Aminoisobutyric Acid
  MOD_RES (10)..(10): Covalently bound to C16 fatty acyl group
  MOD_RES (16)..(16): Aminoisobutyric Acid
HXQGTFTSDKSKYLDXRRAQDFVCWLMNT

SEQ ID NO: 622 - protein, 30 aa, Artificial Sequence
  Synthetic peptide
  MISC_FEATURE: c-term amidation
  MOD_RES (2)..(2): Aminoisobutyric Acid
  MOD_RES (10)..(10): Covalently bound to C16 fatty acyl group
  MOD_RES (16)..(16): Aminoisobutyric Acid
HXQGTFTSDKSKYLDXRRAQDFVCWLMNTK

SEQ ID NO: 623 - protein, 29 aa, Artificial Sequence
  Synthetic peptide
  MISC_FEATURE: beta-Ala-beta-Ala - C16 Glucagon Amide
  MISC_FEATURE: c-term amidation
  MISC_FEATURE (10)..(10): Acylated with a C16 fatty acyl group via beta-Ala-beta-Ala spacer
HSQGTFTSDKSKYLDSRRAQDFVQWLMNT

SEQ ID NO: 624 - protein, 29 aa, Artificial Sequence
  Synthetic peptide
  MISC_FEATURE: Chimera-2 Aib2C24Mal40KPEG
  MOD_RES (2)..(2): Xaa is Aib
  MOD_RES (24)..(24): Covalently bound to 40kDa PEG via thioether made by reaction of peptide with a maleimide-activated PEG
  MOD_RES (29)..(29): AMIDATION
HXQGTFTSDYSKYLDEQAAKEFICWLMNT

SEQ ID NO: 625 - protein, 29 aa, Artificial Sequence
  Synthetic peptide
  MISC_FEATURE: Chimera-2 Aib2E16K20lactamC24Mal40KPEG
  MOD_RES (2)..(2): Xaa is Aib
  MISC_FEATURE (16)..(20): Lactam ring between side chains of the amino acids at positions 16 and 20
  MOD_RES (24)..(24): Covalently bound to 40kDa PEG via thioether made by reaction of peptide with a maleimide-activated PEG
  MOD_RES (29)..(29): AMIDATION
HXQGTFTSDYSKYLDEQAAKEFICWLMNT

SEQ ID NO: 626 - protein, 29 aa, Artificial Sequence
  Synthetic peptide
  MISC_FEATURE: Glucagon Aib2E16K20lactamC24amideMal40KPEG
  MOD_RES (2)..(2): Xaa is Aib
  MISC_FEATURE (16)..(20): Lactam ring between side chains of amino acids at positions 16 and 20
  MOD_RES (24)..(24): Covalently bound to 40kDa PEG via thioether made by reaction of peptide with a maleimide-activated PEG
  MOD_RES (29)..(29): AMIDATION
HXQGTFTSDYSKYLDERRAKDFVCWLMNT

SEQ ID NO: 627 - skipped

SEQ ID NO: 628 - protein, 29 aa, Artificial Sequence
  Synthetic peptide
  MISC_FEATURE: Glucagon Dmia1E16K20lactamC24Mal40KPEG
  MOD_RES (1)..(1): Xaa is Dmia
  MISC_FEATURE (16)..(20): Lactam ring between side chains of amino acids at positions 16 and 20
  MOD_RES (24)..(24): Covalently bound to 40kDa PEG via thioether made by reaction of peptide with a maleimide-activated PEG
  MOD_RES (29)..(29): AMIDATION
XSQGTFTSDYSKYLDERRAKDFVCWLMNT

SEQ ID NO: 629 - protein, 29 aa, Artificial Sequence
  Synthetic peptide
  MISC_FEATURE: Glucagon Dmia1E16K20lactamC24Mal40KPEG
  MOD_RES (1)..(1): Xaa is Dmia
  MISC_FEATURE (16)..(20): Lactam ring between side chains of amino acids at positions 16 and 20
  MISC_FEATURE (24)..(24): Covalently bound to 40kDa PEG via thioether made by reaction of peptide with a maleimide-activated PEG
XSQGTFTSDYSKYLDERRAKDFVCWLMNT

SEQ ID NO: 630 - protein, 29 aa, Artificial Sequence
  Synthetic peptide
  MISC_FEATURE: Glucagon Dmia1E16K20lactamC24thioether40KPEG
  MOD_RES (1)..(1): Xaa is Dmia
  MISC_FEATURE (16)..(20): Lactam ring between side chains of amino acids at position 16 and 20
  MOD_RES (24)..(24): Covalently bound to 40kDa PEG via thioether made by reaction of peptide with haloacetyl-activated PEG
  MOD_RES (29)..(29): AMIDATION
XSQGTFTSDYSKYLDERRAKDFVCWLMNT

SEQ ID NO: 631 - protein, 29 aa, Artificial Sequence
  Synthetic peptide
  MISC_FEATURE: Chimera2 Aib2E3C24-Thioether40K PEG
  MOD_RES (2)..(2): Xaa is Aib
  MOD_RES (24)..(24): Covalently bound to 40kDa PEG via thioether made by reaction of peptide with haloacetyl-activated PEG
  MOD_RES (29)..(29): AMIDATION
HXEGTFTSDYSKYLDEQAAKEFICWLMNT

SEQ ID NO: 632 - protein, 29 aa, Artificial Sequence
  Synthetic peptide
  MOD_RES (1)..(1): Xaa is Dmia
  MOD_RES (24)..(24): Covalently bound to 40kDa PEG
  MOD_RES (29)..(29): AMIDATION
XSEGTFTSDYSKYLEERRAKDFVCWLMNT

SEQ ID NO: 633 - protein, 29 aa, Artificial Sequence
  Synthetic peptide
  MISC_FEATURE: Glucagon Aib2Aib16C24K10(rErE-C16) C24PEG40K amide
  MOD_RES (2)..(2): Xaa is Aib
  MOD_RES (10)..(10): Covalently bound to C14 fatty acyl group via gamma-Glu-gamma-Glu spacer
  MOD_RES (16)..(16): Xaa is Aib
  MOD_RES (24)..(24): Covalently bound to 40kDa PEG via thioether made by reaction of peptide with haloacetyl-activated PEG
  MOD_RES (29)..(29): AMIDATION
HXQGTFTSDKSKYLDXRRAQDFVCWLMNT

SEQ ID NO: 634 - protein, 29 aa, Artificial Sequence
  Synthetic peptide
  MISC_FEATURE: Glucagon Aib2Aib16K10(AA-C14)C24PEG40K TE amide
  MOD_RES (2)..(2): Xaa is Aib
  MOD_RES (10)..(10): Covalently bound to C14 fatty acyl group via Ala-Ala spacer
  MOD_RES (16)..(16): Xaa is Aib
  MOD_RES (24)..(24): Covalently bound to 40kDa PEG via thioether made by reaction of peptide with haloacetyl-activated PEG
  MOD_RES (29)..(29): AMIDATION
HXQGTFTSDKSKYLDXRRAQDFVCWLMNT

SEQ ID NO: 635 - protein, 29 aa, Artificial Sequence
  Synthetic peptide
  MISC_FEATURE: Glucagon Aib2Aib16K10(AA-C16) amide
  MOD_RES (2)..(2): Xaa is Aib
  MOD_RES (10)..(10): Covalently bound to C16 fatty acyl group via Ala-Ala spacer
  MOD_RES (16)..(16): Xaa is Aib
  MOD_RES (29)..(29): AMIDATION
HXQGTFTSDKSKYLDXRRAQDFVQWLMNT

SEQ ID NO: 636 - protein, 29 aa, Artificial Sequence
  Synthetic peptide
  MISC_FEATURE: Glucagon Aib2Aib16K10(rErE-C16) amide
  MOD_RES (2)..(2): Xaa is Aib
  MOD_RES (10)..(10): Covalently bound to C16 fatty acyl group via gamma-Glu-gamma-Glu spacer
  MOD_RES (16)..(16): Xaa is Aib
  MOD_RES (29)..(29): AMIDATION
HXQGTFTSDKSKYLDXRRAQDFVQWLMNT

SEQ ID NO: 637 - protein, 29 aa, Artificial Sequence
  Synthetic peptide
  MOD_RES (2)..(2): Xaa is Aib
  MOD_RES (16)..(16): Xaa is Aib
  MOD_RES (29)..(29): AMIDATION
HXQGTFTSDYSKYLDXRRAQDFVQWLMNT

SEQ ID NO: 638 - DNA, 20 bp, Artificial Sequence
  Synthetic primer
caaggtccagggaggttgtg

SEQ ID NO: 639 - DNA, 24 bp, Artificial Sequence
  Synthetic primer
ccaaaggtaagctgtccataagga

SEQ ID NO: 640 - DNA, 22 bp, Artificial Sequence
  Synthetic primer
ctctcccaagagtcacatgtcc

SEQ ID NO: 641 - DNA, 22 bp, Artificial Sequence
  Synthetic primer
caataactcggtcccctacaac

SEQ ID NO: 642 - protein, 29 aa, Artificial Sequence
  Synthetic peptide
HSQGTFTSDYSKYLDSRRAQDFVQWLMDT

SEQ ID NO: 643 - protein, 29 aa, Artificial Sequence
  Synthetic peptide
  MISC_FEATURE: c-term amidation
  MOD_RES (2)..(2): Xaa is d-Ser
  MOD_RES (10)..(10): Acylated with a C16 fatty acyl group via gamma-Glu spacer
HXQGTFTSDKSKYLDEQAAKEFIAWLMNT

SEQ ID NO: 644 - protein, 29 aa, Artificial Sequence
  Synthetic peptide
  MISC_FEATURE: c-term amidation
  MOD_RES (2)..(2): Xaa is d-Ser
  MOD_RES (10)..(10): Acylated with a C16 fatty acyl group via gamma-Glu-gamma-Glu spacer
HXQGTFTSDKSKYLDEQAAKEFIAWLMNT

SEQ ID NO: 645 - protein, 29 aa, Artificial Sequence
  Synthetic peptide
  MISC_FEATURE: c-term amidation
  MOD_RES (2)..(2): Xaa is Aib
  MOD_RES (10)..(10): Acylated with a C16 fatty acyl group via gamma-Glu spacer
HXQGTFTSDKSKYLDEQAAKEFIAWLMNT

SEQ ID NO: 646 - protein, 29 aa, Artificial Sequence
  Synthetic peptide
  MISC_FEATURE: c-term amidation
  MOD_RES (2)..(2): Xaa is Aib
  MOD_RES (10)..(10): Acylated with a C16 fatty acyl group via gamma-Glu-gamma-Glu spacer
HXQGTFTSDKSKYLDEQAAKEFIAWLMNT

SEQ ID NO: 647 - protein, 29 aa, Artificial Sequence
  Synthetic peptide
  MISC_FEATURE: c-term amidation
  MOD_RES (2)..(2): Xaa is Aib
  MOD_RES (10)..(10): Acylated with a C16 fatty acyl group
HXEGTFTSDKSKYLDEQAAKEFIAWLMNT

SEQ ID NO: 648 - protein, 29 aa, Artificial Sequence
  Synthetic peptide
  MISC_FEATURE: c-term amidation
  MOD_RES (2)..(2): Xaa is Aib
  MOD_RES (10)..(10): Acylated with a C16 fatty acyl group via gamma-Glu-gamma-Glu spacer
HXEGTFTSDKSKYLDEQAAKEFIAWLMNT

SEQ ID NO: 649 - protein, 29 aa, Artificial Sequence
  Synthetic peptide
  MISC_FEATURE: c-term amidation
  MOD_RES (2)..(2): Xaa is Aib
  MOD_RES (10)..(10): Acylated with a C16 fatty acyl group via gamma-Glu spacer
HXQGTFISDKSKYLDEQAAKEFIAWLMNT

SEQ ID NO: 650 - protein, 29 aa, Artificial Sequence
  Synthetic peptide
  MISC_FEATURE: c-term amidation
  MOD_RES (2)..(2): Xaa is Aib
  MOD_RES (10)..(10): Acylated with a C16 fatty acyl group via gamma-Glu-gamma-Glu spacer
HXQGTFISDKSKYLDEQAAKEFIAWLMNT

SEQ ID NO: 651 - protein, 29 aa, Artificial Sequence
  Synthetic peptide
  MISC_FEATURE: c-term amidation
  MOD_RES (1)..(1): Xaa is Dmia
  MOD_RES (10)..(10): Acylated with a C16 fatty acyl group via gamma-Glu spacer
  MISC_FEATURE (16)..(20): Lactam ring between side chains of amino acids at positions 16 and 20
XSQGTFTSDKSKYLDERRAKDFVQWLMNT

SEQ ID NO: 652 - protein, 29 aa, Artificial Sequence
  Synthetic peptide
  MISC_FEATURE: c-term amidation
  MOD_RES (1)..(1): Xaa is Dmia
  MOD_RES (10)..(10): Acylated with a C16 fatty acyl group via gamma-Glu-gamma-Glu spacer
  MISC_FEATURE (16)..(20): Lactam ring between side chains of amino acids at positions 16 and 20
XSQGTFTSDKSKYLDERRAKDFVQWLMNT

SEQ ID NO: 653 - protein, 29 aa, Artificial Sequence
  Synthetic peptide
  MISC_FEATURE: c-term amidation
  MOD_RES (1)..(1): Xaa is Dmia
  MISC_FEATURE (16)..(20): Lactam ring between side chains of amino acids at positions 16 and 20
  MOD_RES (29)..(29): Acylated with a C16 fatty acyl group via gamma-Glu spacer
XSQGTFTSDYSKYLDERRAKDFVQWLMNK

SEQ ID NO: 654 - protein, 29 aa, Artificial Sequence
  Synthetic peptide
  MISC_FEATURE: c-term amidation
  MOD_RES (1)..(1): Xaa is Dmia
  MISC_FEATURE (16)..(20): Lactam ring between side chains of amino acids at positions 16 and 20
  MOD_RES (29)..(29): Acylated with a C16 fatty acyl group via gamma-Glu-gamma-Glu spacer
XSQGTFTSDYSKYLDERRAKDFVQWLMNK

SEQ ID NO: 655 - protein, 29 aa, Artificial Sequence
  Synthetic peptide
  MISC_FEATURE: c-term amidation
  MOD_RES (2)..(2): Xaa is Aib
  MOD_RES (10)..(10): Acylated with a C16 fatty acyl group via gamma-Glu-gamma-Glu spacer
  MOD_RES (16)..(16): Xaa is Aib
HXQGTFTSDKSKYLDXRAAQDFVQWLMDT

SEQ ID NO: 656 - protein, 29 aa, Artificial Sequence
  Synthetic peptide
  MISC_FEATURE: c-term amidation
  MOD_RES (2)..(2): Xaa is Aib
  MOD_RES (10)..(10): Acylated with a C16 fatty acyl group via gamma-Glu spacer
  MOD_RES (16)..(16): Xaa is Aib
HXQGTFTSDKSKYLDXRAAQDFVQWLMDT

SEQ ID NO: 657 - protein, 29 aa, Artificial Sequence
  Synthetic peptide
  MISC_FEATURE: c-term amidation
  MOD_RES (2)..(2): Aminoisobutryic Acid
  MOD_RES (10)..(10): Acylated with a C16 fatty acyl group via dipeptide spacer
  MOD_RES (16)..(16): Aminoisobutryic Acid
HXQGTFTSDKSKYLDXRRAQDFVQWLMNT

SEQ ID NO: 658 - protein, 29 aa, Artificial Sequence
  Synthetic peptide
  MISC_FEATURE: c-term amidation
  MOD_RES (2)..(2): Aminoisobutyric Acid
  MOD_RES (10)..(10): Acylated with a C14 fatty acyl group via dipeptide spacer
  MOD_RES (16)..(16): Aminoisobutyric Acid
  MOD_RES (24)..(24): Pegylated
HXQGTFTSDKSKYLDXRRAQDFVCWLMNT

SEQ ID NO: 659 - protein, 29 aa, Artificial Sequence
  Synthetic peptide
  MISC_FEATURE: c-term amidation
  MOD_RES (2)..(2): Aminoisobutryic Acid
  MOD_RES (10)..(10): Acylated with a C14 fatty acyl group via dipeptide spacer
  MOD_RES (16)..(16): Aminoisobutryic Acid
HXQGTFTSDKSKYLDXRRAQDFVQWLMNT

SEQ ID NO: 660 - protein, 29 aa, Artificial Sequence
  Synthetic peptide
  MISC_FEATURE: c-term amidation
  MOD_RES (2)..(2): Aminoisobutryic Acid
  MOD_RES (10)..(10): Acylated with a C16 fatty acyl group via dipeptide spacer
  MOD_RES (16)..(16): Aminoisobutryic Acid
  MOD_RES (24)..(24): Pegylated
HXQGTFTSDKSKYLDXRRAQDFVCWLMNT

SEQ ID NO: 661 - protein, 29 aa, Artificial Sequence
  Synthetic peptide
  MISC_FEATURE: c-term amidation
  MOD_RES (10)..(10): Acylated with a C16 fatty acyl group via dipeptide spacer
HSQGTFTSDKSKYLDSRRAQDFVQWLMNT

SEQ ID NO: 662 - protein, 30 aa, Artificial Sequence; identical to SEQ ID NO: 581
  Synthetic peptide
  MISC_FEATURE: Peptide dS2E16K20K30-C14 Gluc Amide
  MISC_FEATURE: c-term amidation
  MOD_RES (2)..(2): D-serine, D-alanine, valine, amino n-butyric acid, glycine, N-methyl serine, aminoisobutyric acid
  MOD_RES (30)..(30): Acylated with a C14 fatty acyl group

SEQ ID NO: 663 - protein, 29 aa, Artificial Sequence
  Synthetic peptide
  MISC_FEATURE: Peptide dS2K10(C14)E16K20-Gluc Amide
  MISC_FEATURE: c-term amidation
  MOD_RES (2)..(2): D-serine, D-alanine, valine, amino n-butyric acid, glycine, N-methyl serine, aminoisobutyric acid
  MOD_RES (10)..(10): Acylated with a C14 fatty acyl group
HXQGTFTSDKSKYLDERRAKDFVQWLMNT

SEQ ID NO: 664 - protein, 30 aa, Artificial Sequence; identical to SEQ ID NO: 581
  Synthetic peptide
  MISC_FEATURE: Peptide dS2E16K20K30-C16 Gluc Amide
  MISC_FEATURE: c-term amidation
  MOD_RES (2)..(2): D-serine, D-alanine, valine, amino n-butyric acid, glycine, N-methyl serine, aminoisobutyric acid
  MOD_RES (30)..(30): Acylated with a C16 fatty acyl group

SEQ ID NO: 665 - protein, 29 aa, Artificial Sequence
  Synthetic peptide
  MISC_FEATURE: Peptide dS2K10(C16)E16K20-Gluc Amide
  MISC_FEATURE: c-term amidation
  MOD_RES (2)..(2): D-serine, D-alanine, valine, amino n-butyric acid, glycine, N-methyl serine, aminoisobutyric acid
  MOD_RES (10)..(10): Acylated with a C16 fatty acyl group
HXQGTFTSDKSKYLDERRAKDFVQWLMNT

SEQ ID NO: 666 - protein, 29 aa, Artificial Sequence
  Synthetic peptide
  MISC_FEATURE: c-term amidation
  MOD_RES (2)..(2): D-serine, D-alanine, valine, amino n-butyric acid, glycine, N-methyl serine, aminoisobutyric acid
  MOD_RES (10)..(10): Covalently bound to C14 fatty acyl group
HXQGTFTSDKSKYLDERRAKDFVQWLMNT

SEQ ID NO: 667 - protein, 29 aa, Artificial Sequence
  Synthetic peptide
  MISC_FEATURE: c-term amidation
  MOD_RES (2)..(2): D-serine, D-alanine, valine, amino n-butyric acid, glycine, N-methyl serine, aminoisobutyric acid
  MOD_RES (10)..(10): Covalently bound to C16 fatty acyl group
HXQGTFTSDKSKYLDERRAKDFVQWLMNT

SEQ ID NO: 668 - protein, 29 aa, Artificial Sequence
  Synthetic peptide
  MISC_FEATURE: c-term amidation
  MOD_RES (2)..(2): D-serine, D-alanine, valine, amino n-butyric acid, glycine, N-methyl serine, aminoisobutyric acid
  MOD_RES (10)..(10): Covalently bound to a C18 fatty acyl group
HXQGTFTSDKSKYLDERRAKDFVQWLMNT

SEQ ID NO: 669 - protein, 29 aa, Artificial Sequence
  Synthetic peptide
  MISC_FEATURE: c-term amidation
  MOD_RES (2)..(2): Aminoisobutryic Acid
  MOD_RES (10)..(10): Covalently bound to C14 fatty acyl group via dipeptide spacer
  MOD_RES (16)..(16): Aminoisobutryic Acid
HXQGTFTSDKSKYLDXRRAQDFVCWLMNT

SEQ ID NO: 670 - protein, 29 aa, Artificial Sequence
  Synthetic peptide
  MISC_FEATURE: Glucagon Aib2Aib16C24K10(rErE-C16) C24PEG40K amide
  MOD_RES (2)..(2): Xaa is Aib
  MOD_RES (10)..(10): Covalently bound to C14 fatty acyl group via dipeptide spacer
  MOD_RES (16)..(16): Xaa is Aib
  MOD_RES (24)..(24): Covalently bound to 40kDa PEG via thioether made by reaction of peptide with haloacetyl-activated PEG
  MOD_RES (29)..(29): AMIDATION
HXQGTFTSDKSKYLDXRRAQDFVCWLMNT

SEQ ID NO: 671 - protein, 29 aa, Artificial Sequence
  Synthetic peptide
  MISC_FEATURE: Glucagon Aib2Aib16K10(rErE-C16) amide
  MOD_RES (2)..(2): Xaa is Aib
  MOD_RES (10)..(10): Covalently bound to C16 fatty acyl group via dipeptide spacer
  MOD_RES (16)..(16): Xaa is Aib
  MOD_RES (29)..(29): AMIDATION
HXQGTFTSDKSKYLDXRRAQDFVQWLMNT

SEQ ID NO: 672 - protein, 29 aa, Artificial Sequence
  Synthetic peptide
  MISC_FEATURE: c-term amidation
  MOD_RES (2)..(2): D-serine, D-alanine, valine, amino n-butyric acid, glycine, N-methyl serine, aminoisobutyric acid
  MOD_RES (10)..(10): Acylated with a C16 fatty acyl group via acidic amino acid spacer
HXQGTFTSDKSKYLDEQAAKEFIAWLMNT

SEQ ID NO: 673 - protein, 29 aa, Artificial Sequence
  Synthetic peptide
  MISC_FEATURE: c-term amidation
  MOD_RES (2)..(2): D-serine, D-alanine, valine, amino n-butyric acid, glycine, N-methyl serine, aminoisobutyric acid
  MOD_RES (10)..(10): Acylated with a C16 fatty acyl group via dipeptide spacer
HXQGTFTSDKSKYLDEQAAKEFIAWLMNT

SEQ ID NO: 674 - protein, 29 aa, Artificial Sequence
  Synthetic peptide
  MISC_FEATURE: c-term amidation
  MOD_RES (2)..(2): Xaa is Aib
  MOD_RES (10)..(10): Acylated with a C16 fatty acyl group via acidic amino acid spacer
HXQGTFTSDKSKYLDEQAAKEFIAWLMNT

SEQ ID NO: 675 - protein, 29 aa, Artificial Sequence
  Synthetic peptide
  MISC_FEATURE: c-term amidation
  MOD_RES (2)..(2): Xaa is Aib
  MOD_RES (10)..(10): Acylated with a C16 fatty acyl group via dipeptide spacer
HXQGTFTSDKSKYLDEQAAKEFIAWLMNT

SEQ ID NO: 676 - protein, 29 aa, Artificial Sequence
  Synthetic peptide
  MISC_FEATURE: c-term amidation
  MOD_RES (2)..(2): Xaa is Aib
  MOD_RES (10)..(10): Acylated with a C16 fatty acyl group via dipeptide spacer
HXEGTFTSDKSKYLDEQAAKEFIAWLMNT

SEQ ID NO: 677 - protein, 29 aa, Artificial Sequence
  Synthetic peptide
  MISC_FEATURE: c-term amidation
  MOD_RES (2)..(2): Xaa is Aib
  MOD_RES (10)..(10): Acylated with a C16 fatty acyl group via acidic amino acid spacer
HXQGTFISDKSKYLDEQAAKEFIAWLMNT

SEQ ID NO: 678 - protein, 29 aa, Artificial Sequence
  Synthetic peptide
  MISC_FEATURE: c-term amidation
  MOD_RES (2)..(2): Xaa is Aib
  MOD_RES (10)..(10): Acylated with a C16 fatty acyl group via dipeptide spacer
HXQGTFISDKSKYLDEQAAKEFIAWLMNT

SEQ ID NO: 679 - protein, 29 aa, Artificial Sequence
  Synthetic peptide
  MISC_FEATURE: c-term amidation
  MOD_RES (1)..(1): Xaa is Dmia
  MOD_RES (10)..(10): Acylated with a C16 fatty acyl group via acidic amino acid spacer
  MISC_FEATURE (16)..(20): Lactam ring between side chains of amino acids at positions 16 and 20
XSQGTFTSDKSKYLDERRAKDFVQWLMNT

SEQ ID NO: 680 - protein, 29 aa, Artificial Sequence
  Synthetic peptide
  MISC_FEATURE: c-term amidation
  MOD_RES (1)..(1): Xaa is Dmia
  MOD_RES (10)..(10): Acylated with a C16 fatty acyl group via dipeptide spacer
  MISC_FEATURE (16)..(20): Lactam ring between side chains of amino acids at positions 16 and 20
XSQGTFTSDKSKYLDERRAKDFVQWLMNT

SEQ ID NO: 681 - protein, 29 aa, Artificial Sequence
  Synthetic peptide
  MISC_FEATURE: c-term amidation
  MOD_RES (1)..(1): Xaa is Dmia
  MISC_FEATURE (16)..(20): Lactam ring between side chains of amino acids at positions 16 and 20
  MOD_RES (29)..(29): Acylated with a C16 fatty acyl group via acidic amino acid spacer
XSQGTFTSDYSKYLDERRAKDFVQWLMNK

SEQ ID NO: 682 - protein, 29 aa, Artificial Sequence
  Synthetic peptide
  MISC_FEATURE: c-term amidation
  MOD_RES (1)..(1): Xaa is Dmia
  MISC_FEATURE (16)..(20): Lactam ring between side chains of amino acids at positions 16 and 20
  MOD_RES (29)..(29): Acylated with a C16 fatty acyl group via dipeptide spacer
XSQGTFTSDYSKYLDERRAKDFVQWLMNK

SEQ ID NO: 683 - protein, 29 aa, Artificial Sequence
  Synthetic peptide
  MISC_FEATURE: c-term amidation
  MOD_RES (2)..(2): Xaa is Aib
  MOD_RES (10)..(10): Acylated with a C16 fatty acyl group via dipeptide spacer
  MOD_RES (16)..(16): Xaa is Aib
HXQGTFTSDKSKYLDXRAAQDFVQWLMDT

SEQ ID NO: 684 - protein, 29 aa, Artificial Sequence
  Synthetic peptide
  MISC_FEATURE: c-term amidation
  MOD_RES (2)..(2): Xaa is Aib
  MOD_RES (10)..(10): Acylated with a C16 fatty acyl group via acidic amino acid spacer
  MOD_RES (16)..(16): Xaa is Aib
HXQGTFTSDKSKYLDXRAAQDFVQWLMDT

SEQ ID NO: 685 - protein, 29 aa, Artificial Sequence
  Synthetic peptide
  MOD_RES (2)..(2): Xaa is AIB
  misc_feature (16)..(16): Xaa can be any naturally occurring amino acid
  misc_feature (20)..(20): Xaa can be any naturally occurring amino acid
  MOD_RES (29)..(29): C-terminal amidation
HSQGTFTSDYSKYLDXQAAXGFIAWLMNT

SEQ ID NO: 686 - protein, 29 aa, Artificial Sequence
  Synthetic peptide
  MOD_RES (2)..(2): Xaa is AIB
  MOD_RES (10)..(10): Acylated with C16 fatty acyl group
  MOD_RES (16)..(16): Xaa is AIB
  MOD_RES (29)..(29): C-terminal amidation
HXQGTFTSDKSKYLDXRAAQDFVQWLMDT

SEQ ID NO: 687 - protein, 29 aa, Artificial Sequence
  Synthetic peptide
  MOD_RES (2)..(2): Xaa is AIB
  MOD_RES (10)..(10): Acylated with C14 fatty acyl group via dipeptide spacer
  MOD_RES (16)..(16): Xaa is AIB
  MOD_RES (29)..(29): C-terminal amidation
HXQGTFTSDKSKYLDXRAAQDFVQWLMDT

SEQ ID NO: 688 - protein, 29 aa, Artificial Sequence
  Synthetic peptide
  MOD_RES (2)..(2): Xaa is AIB
  MOD_RES (10)..(10): Acylated with C18 fatty acyl group via dipeptide spacer
  MOD_RES (16)..(16): Xaa is AIB
  MOD_RES (29)..(29): C-terminal amidation
HXQGTFTSDKSKYLDXRAAQDFVQWLMDT

SEQ ID NO: 689 - protein, 29 aa, Artificial Sequence
  Synthetic peptide
  MOD_RES (2)..(2): Xaa is AIB
  MOD_RES (10)..(10): Acylated with C16 fatty acyl group via dipeptide spacer
  MOD_RES (16)..(16): Xaa is AIB
  MOD_RES (29)..(29): C-terminal amidation
HXEGTFTSDKSKYLDXRAAQDFVQWLMDT

SEQ ID NO: 690 - protein, 29 aa, Artificial Sequence
  Synthetic peptide
  MOD_RES (2)..(2): Xaa is AIB
  MOD_RES (10)..(10): Acylated with C16 fatty acyl group via dipeptide spacer
  MOD_RES (16)..(16): Xaa is AIB
HXQGTFISDKSKYLDXRAAQDFVQWLMDT

SEQ ID NO: 691 - protein, 29 aa, Artificial Sequence
  Synthetic peptide
  MOD_RES (2)..(2): Xaa is AIB
  MOD_RES (10)..(10): Acylated with C16 fatty acyl group via dipeptide spacer
  MOD_RES (29)..(29): C-terminal amidation
HXQGTFTSDKSKYLDERAAQDFVQWLMDT

SEQ ID NO: 692 - protein, 29 aa, Artificial Sequence
  Synthetic peptide
  MOD_RES (2)..(2): Xaa is AIB
  MOD_RES (10)..(10): Acylated with C16 fatty acyl group via dipeptide spacer
  MOD_RES (16)..(16): Xaa is AIB
  MOD_RES (29)..(29): C-terminal amidation
HXQGTFTSDKSKYLEXRAAQDFVQWLMDT

SEQ ID NO: 693 - protein, 29 aa, Artificial Sequence
  Synthetic peptide
  MOD_RES (2)..(2): d-Ser
  MOD_RES (10)..(10): Acylated with C16 fatty acyl group via dipeptide spacer
  MOD_RES (16)..(16): Xaa is AIB
  MOD_RES (29)..(29): C-terminal amidation
HSQGTFTSDKSKYLDXRAAQDFVQWLMDT

SEQ ID NO: 694 - protein, 29 aa, Artificial Sequence
  Synthetic peptide
  MOD_RES (2)..(2): Xaa is AIB
  MOD_RES (10)..(10): Acylated with C16 fatty acyl group via dipeptide spacer
  MOD_RES (16)..(16): Xaa is AIB
  MOD_RES (29)..(29): C-terminal amidation
HXQGTFTSDKSKYLDXRAAQDFVQWLLDT

SEQ ID NO: 695 - protein, 29 aa, Artificial Sequence
  Synthetic peptide
  MOD_RES (2)..(2): Xaa is AIB
  MOD_RES (10)..(10): Acylated with C16 fatty acyl group via dipeptide spacer
  MOD_RES (29)..(29): C-terminal amidation
HXQGTFTSDKSKYLDEQAAKEFIAWLLDT

SEQ ID NO: 696 - protein, 29 aa, Artificial Sequence
  Synthetic peptide
  MOD_RES (2)..(2): Xaa is AIB
  MOD_RES (10)..(10): Acylated with C16 fatty acyl group via gamma-Glu spacer
  MOD_RES (29)..(29): C-terminal amidation
HXQGTFTSDKSKYLDEQAAKEFICWLLDT

SEQ ID NO: 697 - protein, 29 aa, Artificial Sequence
  Synthetic peptide
  MOD_RES (2)..(2): Xaa is AIB
  MOD_RES (10)..(10): Acylated with C16 fatty acyl group via gamma-Glu spacer
  MOD_RES (24)..(24): PEGYLATION
  MOD_RES (29)..(29): C-terminal amidation
HXQGTFTSDKSKYLDEQAAKEFICWLLDT

SEQ ID NO: 698 - protein, 29 aa, Artificial Sequence
  Synthetic peptide
  MOD_RES (2)..(2): Xaa is AIB
  MOD_RES (10)..(10): Acylated with C16 fatty acyl group via gamma-Glu spacer
  MOD_RES (24)..(24): PEGYLATION
  MOD_RES (29)..(29): C-terminal amidation
HXQGTFTSDKSKYLDERAAQDFVCWLLDT

SEQ ID NO: 699 - protein, 30 aa, Artificial Sequence
  Synthetic peptide
  MOD_RES (2)..(2): Xaa is AIB
  MOD_RES (10)..(10): Acylated with C16 fatty acyl group via gamma-Glu spacer
  MOD_RES (30)..(30): PEGYLATION
  MOD_RES (30)..(30): C-terminal amidation
HXQGTFTSDKSKYLDEQAAKEFIQWLLDTC

SEQ ID NO: 700 - protein, 29 aa, Artificial Sequence
  Synthetic peptide
  MOD_RES (10)..(10): Acylated with C16 fatty acyl group via gamma-Glu spacer
  MOD_RES (24)..(24): PEGYLATION
  MOD_RES (29)..(29): C-terminal amidation
HAQGTFTSDKSKYLDERAAQDFVCWLLDT

SEQ ID NO: 701 - protein, 29 aa, Artificial Sequence
  Synthetic peptide
  MOD_RES (2)..(2): d-Ser
  MOD_RES (10)..(10): Acylated with C16 fatty acyl group via gamma-Glu spacer
  MOD_RES (29)..(29): C-terminal amidation
HSQGTFTSDKSKYLDEQAAKEFICWLLDT

SEQ ID NO: 702 - protein, 29 aa, Artificial Sequence
  Synthetic peptide
  MOD_RES (2)..(2): d-Ser
  MOD_RES (10)..(10): Acylated with C16 fatty acyl group via gamma-Glu spacer
  MOD_RES (29)..(29): C-terminal amidation
HSQGTFTSDKSKYLDERAAQDFVQWLLDT

SEQ ID NO: 703 - protein, 29 aa, Artificial Sequence
  Synthetic peptide
  MOD_RES (2)..(2): d-Ser
  MOD_RES (10)..(10): Acylated with C16 fatty acyl group via gamma-Glu spacer
  MOD_RES (29)..(29): C-terminal amidation
HSQGTFTSDKSKYLDERAAQDFVCWLLDT

SEQ ID NO: 704 - protein, 29 aa, Artificial Sequence
  Synthetic peptide
  MOD_RES (2)..(2): d-Ser
  MOD_RES (10)..(10): Acylated with C16 fatty acyl group via gamma-Glu spacer
HSQGTFTSDKSKYLDEQAAKEFICWLLDT

SEQ ID NO: 705 - protein, 31 aa, Artificial Sequence
  Synthetic peptide
  MOD_RES (2)..(2): d-Ser
  MOD_RES (10)..(10): Acylated with C16 fatty acyl group via gamma-Glu spacer
  MOD_RES (31)..(31): C-terminal amidation
HSQGTFTSDKSKYLDEQAAKEFICWLLDTGE

SEQ ID NO: 706 - protein, 31 aa, Artificial Sequence
  Synthetic peptide
  MOD_RES (2)..(2): d-Ser
  MOD_RES (10)..(10): Acylated with C16 fatty acyl group via gamma-Glu spacer
  MOD_RES (24)..(24): PEGYLATION
HSQGTFTSDKSKYLDEQAAKEFICWLLDTGG

SEQ ID NO: 707 - protein, 29 aa, Artificial Sequence
  Synthetic peptide
  MOD_RES (2)..(2): d-Ser
  MOD_RES (10)..(10): Acylated with C16 fatty acyl group via gamma-Glu spacer
  MOD_RES (24)..(24): PEGYLATION
  MOD_RES (29)..(29): C-terminal amidation
HSQGTFTSDKSKYLDERAAQDFVCWLLDT

SEQ ID NO: 708 - protein, 30 aa, Artificial Sequence
  Synthetic peptide
  MOD_RES (2)..(2): d-Ser
  MOD_RES (10)..(10): Acylated with C16 fatty acyl group via gamma-Glu spacer
  MOD_RES (30)..(30): PEGYLATION
  MOD_RES (30)..(30): C-terminal amidation
HSQGTFTSDKSKYLDERAAQDFVQWLLDTC

SEQ ID NO: 709 - protein, 30 aa, Artificial Sequence
  Synthetic peptide
  MOD_RES (2)..(2): d-Ser
  MOD_RES (10)..(10): Acylated with C16 fatty acyl group via gamma-Glu spacer
  MOD_RES (24)..(24): PEGYLATION
  MOD_RES (30)..(30): C-terminal amidation
HSQGTFTSDYSKYLDSRRAQDFVQWLMNTE

SEQ ID NO: 710 - protein, 30 aa, Artificial Sequence
  Synthetic peptide
  MOD_RES (2)..(2): d-Ser
  MOD_RES (10)..(10): Acylated with C16 fatty acyl group via gamma-Glu spacer
  MOD_RES (24)..(24): PEGYLATION
HSQGTFTSDKSKYLDEQAAKEFICWLLDTC

SEQ ID NO: 711 - protein, 29 aa, Artificial Sequence
  Synthetic peptide
  MOD_RES (1)..(1): Xaa is DMIA
  MOD_RES (10)..(10): Acylated with C16 fatty acyl group via gamma-Glu spacer
  MOD_RES (29)..(29): C-terminal amidation
XSQGTFTSDKSKYLDEQAAKEFICWLLDT

SEQ ID NO: 712 - protein, 29 aa, Artificial Sequence
  Synthetic peptide
  MOD_RES (1)..(1): des-amino-His
  MOD_RES (10)..(10): Acylated with C16 fatty acyl group via gamma-Glu spacer
  MOD_RES (29)..(29): C-terminal amidation
HSQGTFTSDKSKYLDEQAAKEFICWLLDT

SEQ ID NO: 713 - protein, 29 aa, Artificial Sequence
  Synthetic peptide
  MOD_RES (1)..(1): Ac-His
  MOD_RES (10)..(10): Acylated with C16 fatty acyl group via gamma-Glu spacer
  MOD_RES (24)..(24): PEGYLATION
  MOD_RES (29)..(29): C-terminal amidation
HSQGTFTSDKSKYLDEQAAKEFICWLLDT

SEQ ID NO: 714 - protein, 29 aa, Artificial Sequence
  Synthetic peptide
  MOD_RES (2)..(2): Xaa is AIB
  MOD_RES (10)..(10): Acylated with C16 fatty acyl group via gamma-Glu spacer
  MOD_RES (29)..(29): C-terminal amidation
HXQGTFTSDKSKYLDEEAVRLFIEWLMNT

SEQ ID NO: 715 - protein, 29 aa, Artificial Sequence
  Synthetic peptide
  MOD_RES (2)..(2): Xaa is AIB
  MOD_RES (10)..(10): Acylated with C16 fatty acyl group
  MOD_RES (29)..(29): C-terminal amidation
HXQGTFTSDKSKYLDEEAVRLFIEWLMNT

SEQ ID NO: 716 - protein, 29 aa, Artificial Sequence
  Synthetic peptide
  MOD_RES (2)..(2): Xaa is AIB
  MOD_RES (24)..(24): PEGYLATION
  MOD_RES (29)..(29): C-terminal amidation
HXQGTFTSDYSKYLDEEAVRLFICWLMNT

SEQ ID NO: 717 - protein, 29 aa, Artificial Sequence
  Synthetic peptide
  MOD_RES (2)..(2): Xaa is AIB
  MOD_RES (29)..(29): C-terminal amidation
HXQGTFTSDYSKYLDEEAVRLFIEWLMNT

SEQ ID NO: 718 - protein, 29 aa, Artificial Sequence
  Synthetic peptide
  MOD_RES (2)..(2): Xaa is AIB
  MOD_RES (29)..(29): C-terminal amidation
HXQGTFTSDYSKYLDEEAVRLFICWLMNT

SEQ ID NO: 719 - protein, 29 aa, Artificial Sequence
  Synthetic peptide
  MOD_RES (2)..(2): d-Ser
  MOD_RES (24)..(24): PEGYLATION
  MOD_RES (29)..(29): C-terminal amidation
HSQGTFTSDYSKYLDEEAVRLFICWLMNT

SEQ ID NO: 720 - protein, 29 aa, Artificial Sequence
  Synthetic peptide
  MOD_RES (2)..(2): d-Ser
  MOD_RES (29)..(29): C-terminal amidation
HSQGTFTSDYSKYLDEEAVRLFIEWLMNT

SEQ ID NO: 721 - protein, 29 aa, Artificial Sequence
  Synthetic peptide
  MOD_RES (2)..(2): d-Ser
  MOD_RES (29)..(29): C-terminal amidation
HSQGTFTSDYSKYLDEEAVRLFICWLMNT

SEQ ID NO: 722 - protein, 29 aa, Artificial Sequence
  Synthetic peptide
  MOD_RES (10)..(10): Acylated with C16 fatty acyl group via acidic amino acid spacer
  MOD_RES (29)..(29): C-terminal amidation
HSQGTFTSDKSKYLDEEAVRLFIEWLMNT

SEQ ID NO: 723 - protein, 29 aa, Artificial Sequence
  Synthetic peptide
  MOD_RES (10)..(10): Acylated with C16 fatty acyl group via gamma-Glu spacer
  MOD_RES (29)..(29): C-terminal amidation
HSQGTFTSDKSKYLDEEAVRLFIEWLMNT

SEQ ID NO: 724 - protein, 29 aa, Artificial Sequence
  Synthetic peptide
  MOD_RES (2)..(2): Xaa is AIB
  MISC_FEATURE (16)..(20): Salt bridge
  MISC_FEATURE (17)..(21): Salt bridge
  MOD_RES (24)..(24): PEGYLATION
  MOD_RES (29)..(29): C-terminal amidation
HXQGTFTSDYSKYLDEKRAKEFVCWLMNT

SEQ ID NO: 725 - protein, 29 aa, Artificial Sequence
  Synthetic peptide
  MOD_RES (2)..(2): Xaa is AIB
  MOD_RES (16)..(16): Xaa is AIB
  MISC_FEATURE (16)..(20): Salt bridge
  MISC_FEATURE (17)..(21): Salt bridge
  MOD_RES (24)..(24): PEGYLATION
  MOD_RES (29)..(29): C-terminal amidation
HXQGTFTSDYSKYLDXKRAKEFVCWLMNT

SEQ ID NO: 726 - protein, 29 aa, Artificial Sequence
  Synthetic peptide
  MOD_RES (2)..(2): d-Ser
  MISC_FEATURE (16)..(20): Salt bridge
  MISC_FEATURE (17)..(21): Salt bridge
  MOD_RES (24)..(24): PEGYLATION
  MOD_RES (29)..(29): C-terminal amidation
HSQGTFTSDYSKYLDEKRAKEFVCWLMNT

SEQ ID NO: 727 - protein, 29 aa, Artificial Sequence
  Synthetic peptide
  MOD_RES (2)..(2): d-Ser
  MOD_RES (16)..(16): Xaa is AIB
  MISC_FEATURE (16)..(20): Salt bridge
  MISC_FEATURE (17)..(21): Salt bridge
  MOD_RES (24)..(24): PEGYLATION
  MOD_RES (29)..(29): C-terminal amidation
HSQGTFTSDYSKYLDXKRAKEFVCWLMNT

SEQ ID NO: 728 - protein, 29 aa, Artificial Sequence
  Synthetic peptide
  MOD_RES (2)..(2): d-Ser
  MISC_FEATURE (16)..(20): Salt bridge
  MISC_FEATURE (17)..(21): Salt bridge
  MOD_RES (29)..(29): C-terminal amidation
HSQGTFTSDYSKYLDEKRAKEFVQWLMNT

SEQ ID NO: 729 - protein, 29 aa, Artificial Sequence
  Synthetic peptide
  MOD_RES (2)..(2): D-serine, D-alanine, valine, amino n-butyric acid, glycine, N-methyl serine, aminoisobutyric acid
  MOD_RES (16)..(16): Xaa is AIB
  MISC_FEATURE (16)..(20): Salt bridge
  MISC_FEATURE (17)..(21): Salt bridge
  MOD_RES (29)..(29): C-terminal amidation
HSQGTFTSDYSKYLDXKRAKEFVQWLMNT

SEQ ID NO: 730 - protein, 29 aa, Artificial Sequence
  Synthetic peptide
  MOD_RES (2)..(2): D-serine, D-alanine, valine, amino n-butyric acid, glycine, N-methyl serine, aminoisobutyric acid
  MOD_RES (10)..(10): Acylated with C16 fatty acyl group via gamma-Glu spacer
  MISC_FEATURE (15)..(20): Salt bridge
  MOD_RES (16)..(16): Xaa is AIB
  MISC_FEATURE (16)..(21): Salt bridge
  MOD_RES (29)..(29): C-terminal amidation
HSQGTFTSDKSKYLDXKRAKEFVQWLMNT

SEQ ID NO: 731 - protein, 29 aa, Artificial Sequence
  Synthetic peptide
  MOD_RES (1)..(1): Xaa is DMIA
  MOD_RES (16)..(16): Xaa is AIB
  MISC_FEATURE (16)..(20): Salt bridge
  MISC_FEATURE (17)..(21): Salt bridge
  MOD_RES (24)..(24): PEGYLATION
  MOD_RES (29)..(29): C-terminal amidation
XSQGTFTSDYSKYLDXKRAKEFVCWLMNT

SEQ ID NO: 732 - protein, 29 aa, Artificial Sequence
  Synthetic peptide
  MISC_FEATURE (16)..(20): Salt bridge
  MISC_FEATURE (17)..(21): Salt bridge
  MOD_RES (29)..(29): C-terminal amidation
HSQGTFTSDYSKYLDEKRAKEFVQWLMNT

SEQ ID NO: 733 - protein, 29 aa, Artificial Sequence
  Synthetic peptide
  MOD_RES (2)..(2): D-serine, D-alanine, valine, amino n-butyric acid, glycine, N-methyl serine, aminoisobutyric acid
  MOD_RES (10)..(10): Acylated with C16 fatty acyl group via dipeptide spacer
  MOD_RES (16)..(16): Xaa is AIB
  MOD_RES (29)..(29): C-terminal amidation
HXQGTFTSDKSKYLDXRAAQDFVQWLMDT

SEQ ID NO: 734 - protein, 29 aa, Artificial Sequence
  Synthetic peptide
  MOD_RES (2)..(2): Xaa is AIB
  MOD_RES (10)..(10): Acylated with C16 fatty acyl group via acidic amino acid spacer
  MOD_RES (29)..(29): C-terminal amidation
HXQGTFTSDKSKYLDEQAAKEFICWLLDT

SEQ ID NO: 735 - protein, 29 aa, Artificial Sequence
  Synthetic peptide
  MOD_RES (2)..(2): Xaa is AIB
  MOD_RES (10)..(10): Acylated with C16 fatty acyl group via acidic amino acid spacer
  MOD_RES (24)..(24): PEGYLATION
  MOD_RES (29)..(29): C-terminal amidation
HXQGTFTSDKSKYLDEQAAKEFICWLLDT

SEQ ID NO: 736 - protein, 29 aa, Artificial Sequence
  Synthetic peptide
  MOD_RES (2)..(2): Xaa is AIB
  MOD_RES (10)..(10): Acylated with C16 fatty acyl group via acidic amino acid spacer
  MOD_RES (24)..(24): PEGYLATION
  MOD_RES (29)..(29): C-terminal amidation
HXQGTFTSDKSKYLDERAAQDFVCWLLDT

SEQ ID NO: 737 - protein, 30 aa, Artificial Sequence; identical to SEQ ID NO: 699
  Synthetic peptide
  MOD_RES (2)..(2): Xaa is AIB
  MOD_RES (10)..(10): Acylated with C16 fatty acyl group via acidic amino acid spacer
  MOD_RES (30)..(30): PEGYLATION
  MOD_RES (30)..(30): C-terminal amidation

SEQ ID NO: 738 - protein, 29 aa, Artificial Sequence
  Synthetic peptide
  MOD_RES (10)..(10): Acylated with C16 fatty acyl group via acidic amino acid spacer
  MOD_RES (24)..(24): PEGYLATION
  MOD_RES (29)..(29): C-terminal amidation
HAQGTFTSDKSKYLDERAAQDFVCWLLDT

SEQ ID NO: 739 - protein, 29 aa, Artificial Sequence
  Synthetic peptide
  MOD_RES (2)..(2): D-serine, D-alanine, valine, amino n-butyric acid, glycine, N-methyl serine, aminoisobutyric acid
  MOD_RES (10)..(10): Acylated with C16 fatty acyl group via acidic amino acid spacer
  MOD_RES (29)..(29): C-terminal amidation
HXQGTFTSDKSKYLDEQAAKEFICWLLDT

SEQ ID NO: 740 - protein, 29 aa, Artificial Sequence
  Synthetic peptide
  MOD_RES (2)..(2): D-serine, D-alanine, valine, amino n-butyric acid, glycine, N-methyl serine, aminoisobutyric acid
  MOD_RES (10)..(10): Acylated with C16 fatty acyl group via acidic amino acid spacer
  MOD_RES (29)..(29): C-terminal amidation
HXQGTFTSDKSKYLDERAAQDFVQWLLDT

SEQ ID NO: 741 - protein, 29 aa, Artificial Sequence
  Synthetic peptide
  MOD_RES (2)..(2): D-serine, D-alanine, valine, amino n-butyric acid, glycine, N-methyl serine, aminoisobutyric acid
  MOD_RES (10)..(10): Acylated with C16 fatty acyl group via acidic amino acid spacer
  MOD_RES (29)..(29): C-terminal amidation
HXQGTFTSDKSKYLDERAAQDFVCWLLDT

SEQ ID NO: 742 - protein, 29 aa, Artificial Sequence
  Synthetic peptide
  MOD_RES (2)..(2): D-serine, D-alanine, valine, amino n-butyric acid, glycine, N-methyl serine, aminoisobutyric acid
  MOD_RES (10)..(10): Acylated with C16 fatty acyl group via acidic amino acid spacer
HXQGTFTSDKSKYLDEQAAKEFICWLLDT

SEQ ID NO: 743 - protein, 31 aa, Artificial Sequence
  Synthetic peptide
  MOD_RES (2)..(2): D-serine, D-alanine, valine, amino n-butyric acid, glycine, N-methyl serine, aminoisobutyric acid
  MOD_RES (10)..(10): Acylated with C16 fatty acyl group via acidic amino acid spacer
  MOD_RES (31)..(31): C-terminal amidation
HXQGTFTSDKSKYLDEQAAKEFICWLLDTGE

SEQ ID NO: 744 - protein, 31 aa, Artificial Sequence
  Synthetic peptide
  MOD_RES (2)..(2): D-serine, D-alanine, valine, amino n-butyric acid, glycine, N-methyl serine, aminoisobutyric acid
  MOD_RES (10)..(10): Acylated with C16 fatty acyl group via acidic amino acid spacer
  MOD_RES (24)..(24): PEGYLATION
HXQGTFTSDKSKYLDEQAAKEFICWLLDTGG

SEQ ID NO: 745 - protein, 29 aa, Artificial Sequence
  Synthetic peptide
  MOD_RES (2)..(2): D-serine, D-alanine, valine, amino n-butyric acid, glycine, N-methyl serine, aminoisobutyric acid
  MOD_RES (10)..(10): Acylated with C16 fatty acyl group via acidic amino acid spacer
  MOD_RES (24)..(24): PEGYLATION
  MOD_RES (29)..(29): C-terminal amidation
HXQGTFTSDKSKYLDERAAQDFVCWLLDT

SEQ ID NO: 746 - protein, 30 aa, Artificial Sequence
  Synthetic peptide
  MOD_RES (2)..(2): D-serine, D-alanine, valine, amino n-butyric acid, glycine, N-methyl serine, aminoisobutyric acid
  MOD_RES (10)..(10): Acylated with C16 fatty acyl group via acidic amino acid spacer
  MOD_RES (30)..(30): PEGYLATION
  MOD_RES (30)..(30): C-terminal amidation
HXQGTFTSDKSKYLDERAAQDFVQWLLDTC

SEQ ID NO: 747 - protein, 30 aa, Artificial Sequence
  Synthetic peptide
  MOD_RES (2)..(2): D-serine, D-alanine, valine, amino n-butyric acid, glycine, N-methyl serine, aminoisobutyric acid
  MOD_RES (10)..(10): Acylated with C16 fatty acyl group via acidic amino acid spacer
  MOD_RES (24)..(24): PEGYLATION
  MOD_RES (30)..(30): C-terminal amidation
HXQGTFTSDYSKYLDSRRAQDFVQWLMNTE

SEQ ID NO: 748 - protein, 30 aa, Artificial Sequence
  Synthetic peptide
  MOD_RES (2)..(2): D-serine, D-alanine, valine, amino n-butyric acid, glycine, N-methyl serine, aminoisobutyric acid
  MOD_RES (10)..(10): Acylated with C16 fatty acyl group via acidic amino acid spacer
  MOD_RES (24)..(24): PEGYLATION
HXQGTFTSDKSKYLDEQAAKEFICWLLDTC

SEQ ID NO: 749 - protein, 29 aa, Artificial Sequence
  Synthetic peptide
  MOD_RES (1)..(1): Xaa is DMIA
  MOD_RES (10)..(10): Acylated with C16 fatty acyl group via acidic amino acid spacer
  MOD_RES (29)..(29): C-terminal amidation
XSQGTFTSDKSKYLDEQAAKEFICWLLDT

SEQ ID NO: 750 - protein, 29 aa, Artificial Sequence
  Synthetic peptide
  MOD_RES (1)..(1): des-amino-His
  MOD_RES (10)..(10): Acylated with C16 fatty acyl group via acidic amino acid spacer
  MOD_RES (29)..(29): C-terminal amidation
HSQGTFTSDKSKYLDEQAAKEFICWLLDT

SEQ ID NO: 751 - protein, 29 aa, Artificial Sequence
  Synthetic peptide
  MOD_RES (1)..(1): Ac-His
  MOD_RES (10)..(10): Acylated with C16 fatty acyl group via acidic amino acid spacer
  MOD_RES (24)..(24): PEGYLATION
  MOD_RES (29)..(29): C-terminal amidation
HSQGTFTSDKSKYLDEQAAKEFICWLLDT

SEQ ID NO: 752 - protein, 29 aa, Artificial Sequence
  Synthetic peptide
  MOD_RES (2)..(2): Xaa is AIB
  MOD_RES (10)..(10): Acylated with C16 fatty acyl group via acidic amino acid spacer
  MOD_RES (29)..(29): C-terminal amidation
HXQGTFTSDKSKYLDEEAVRLFIEWLMNT

SEQ ID NO: 753 - protein, 29 aa, Artificial Sequence
  Synthetic peptide
  MOD_RES (2)..(2): D-serine, D-alanine, valine, amino n-butyric acid, glycine, N-methyl serine, aminoisobutyric acid
  MOD_RES (24)..(24): PEGYLATION
  MOD_RES (29)..(29): C-terminal amidation
HXQGTFTSDYSKYLDEEAVRLFICWLMNT

SEQ ID NO: 754 - protein, 29 aa, Artificial Sequence
  Synthetic peptide
  MOD_RES (2)..(2): D-serine, D-alanine, valine, amino n-butyric acid, glycine, N-methyl serine, aminoisobutyric acid
  MOD_RES (29)..(29): C-terminal amidation
HXQGTFTSDYSKYLDEEAVRLFIEWLMNT

SEQ ID NO: 755 - protein, 29 aa, Artificial Sequence
  Synthetic peptide
  MOD_RES (2)..(2): D-serine, D-alanine, valine, amino n-butyric acid, glycine, N-methyl serine, aminoisobutyric acid
  MOD_RES (29)..(29): C-terminal amidation
HXQGTFTSDYSKYLDEEAVRLFICWLMNT

SEQ ID NO: 756 - protein, 29 aa, Artificial Sequence
  Synthetic peptide
  MOD_RES (10)..(10): Acylated with C16 fatty acyl group via acidic amino acid spacer
  MOD_RES (29)..(29): C-terminal amidation
HSQGTFTSDKSKYLDEEAVRLFIEWLMNT

SEQ ID NO: 757 - protein, 29 aa, Artificial Sequence
  Synthetic peptide
  MOD_RES (2)..(2): D-serine, D-alanine, valine, amino n-butyric acid, glycine, N-methyl serine, aminoisobutyric acid
  MISC_FEATURE (16)..(20): Salt bridge
  MISC_FEATURE (17)..(21): Salt bridge
  MOD_RES (24)..(24): PEGYLATION
  MOD_RES (29)..(29): C-terminal amidation
HXQGTFTSDYSKYLDEKRAKEFVCWLMNT

SEQ ID NO: 758 - protein, 29 aa, Artificial Sequence
  Synthetic peptide
  MOD_RES (2)..(2): D-serine, D-alanine, valine, amino n-butyric acid, glycine, N-methyl serine, aminoisobutyric acid
  MOD_RES (16)..(16): Xaa is AIB
  MISC_FEATURE (16)..(20): Salt bridge
  MISC_FEATURE (17)..(21): Salt bridge
  MOD_RES (24)..(24): PEGYLATION
  MOD_RES (29)..(29): C-terminal amidation
HSQGTFTSDYSKYLDXKRAKEFVCWLMNT

SEQ ID NO: 759 - protein, 29 aa, Artificial Sequence
  Synthetic peptide
  MOD_RES (2)..(2): D-serine, D-alanine, valine, amino n-butyric acid, glycine, N-methyl serine, aminoisobutyric acid
  MISC_FEATURE (16)..(20): Salt bridge
  MISC_FEATURE (17)..(21): Salt bridge
  MOD_RES (29)..(29): C-terminal amidation
HSQGTFTSDYSKYLDEKRAKEFVQWLMNT

SEQ ID NO: 760 - protein, 29 aa, Artificial Sequence
  Synthetic peptide
  MOD_RES (2)..(2): D-serine, D-alanine, valine, amino n-butyric acid, glycine, N-methyl serine, aminoisobutyric acid
  MOD_RES (10)..(10): Acylated with C16 fatty acyl group via acidic amino acid spacer
  MISC_FEATURE (15)..(20): Salt bridge
  MOD_RES (16)..(16): Xaa is AIB
  MISC_FEATURE (16)..(21): Salt bridge
  MOD_RES (29)..(29): C-terminal amidation
HSQGTFTSDKSKYLDXKRAKEFVQWLMNT

SEQ ID NO: 761-800 - skipped (40 entries)

SEQ ID NO: 801 - protein, 29 aa, Homo sapiens
HSQGTFTSDYSKYLDSRRAQDFVQWLMNT

SEQ ID NO: 802 - protein, 29 aa, Artificial Sequence
  Glucagon analogue
  MOD_RES (16)..(16): Xaa is Ser, Cys, Orn, homocysteine or acetyl phenyalanine
  MOD_RES (27)..(27): Xaa is Met, Leu or Nle
HSQGTFTSDYSKYLDXRRAQDFVQWLXDT

SEQ ID NO: 803 - protein, 29 aa, Artificial Sequence
  Glucagon analogue
  MOD_RES (17)..(17): Xaa is Arg, Cys, Orn, homocysteine or acetyl phenyalanine
  MOD_RES (27)..(27): Xaa is Met, Leu or Nle
HSQGTFTSDYSKYLDSXRAQDFVQWLXDT

SEQ ID NO: 804 - protein, 29 aa, Artificial Sequence
  Glucagon analogue
  MOD_RES (21)..(21): Xaa is Asp, Cys, Orn, homocysteine or acetyl phenylalanine
  MOD_RES (27)..(27): Xaa is Met, Leu or Nle
HSQGTFTSDYSKYLDSRRAQXFVQWLXDT

SEQ ID NO: 805 - protein, 29 aa, Artificial Sequence
  Synthetic peptide
  MOD_RES (24)..(24): Xaa is Gln, Cys, Orn, homocysteine or acetyl phenylalanine
  MOD_RES (27)..(27): Xaa is Met, Leu or Nle
HSQGTFTSDYSKYLDSRRAQDFVXWLXDT

SEQ ID NO: 806 - protein, 29 aa, Artificial Sequence
  Glucagon analogue
  MOD_RES (21)..(21): Xaa is Asp, Cys, Orn, homocysteine or acetyl phenyalanine
  MOD_RES (24)..(24): Xaa is Gln, Cys, Orn, homocysteine or acetyl phenyalanine
  MOD_RES (27)..(27): Xaa is Met, Leu or Nle
HSQGTFTSDYSKYLDSRRAQXFVXWLXDT

SEQ ID NO: 807 - protein, 29 aa, Artificial Sequence
  Glucagon analogue
  MOD_RES (27)..(27): Xaa is Met, Leu or Nle
  MOD_RES (28)..(28): Xaa is Lys, Arg, His, Asp, Glu, cysteic acid or homocysteic acid
  MOD_RES (29)..(29): Xaa is Thr, Lys, Arg, His, Asp, Glu, cysteic acid or homocysteic acid
HSQGTFTSDYSKYLDSRRAQDFVQWLXXX

SEQ ID NO: 808 - protein, 29 aa, Artificial Sequence
  Glucagon analogue
  MOD_RES (27)..(27): Xaa is Met, Leu or Nle
  MOD_RES (28)..(28): Xaa is Asp or Glu
  MOD_RES (29)..(29): Xaa is Thr, Asp or Glu
HSQGTFTSDYSKYLDSRRAQDFVQWLXXX

SEQ ID NO: 809 - protein, 29 aa, Artificial Sequence
  Glucagon analogue
  MOD_RES (27)..(27): Xaa is Met, Leu or Nle
  MOD_RES (29)..(29): Xaa is Asp or Glu
HSQGTFTSDYSKYLDSRRAQDFVQWLXNX

SEQ ID NO: 810 - protein, 29 aa, Artificial Sequence
  Synthetic peptide
  MOD_RES (27)..(27): Xaa is Met, Leu or Nle
HSQGTFTSDYSKYLDSRRAQDFVQWLXDT

SEQ ID NO: 811 - protein, 29 aa, Artificial Sequence
  Glucagon analogue
HSQGTFTSDYSKYLDSRRAQDFVQWLMDT

SEQ ID NO: 812 - protein, 29 aa, Artificial Sequence
  Glucagon analogue
  MOD_RES (29)..(29): Xaa is Lys, Arg or His
HSQGTFTSDYSKYLDSRRAQDFVQWLMNX

SEQ ID NO: 813 - protein, 29 aa, Artificial Sequence
  Glucagon analogue
HSQGTFTSDYSKYLESRRAQDFVQWLMDT

SEQ ID NO: 814 - protein, 29 aa, Artificial Sequence
  Synthetic peptide
  MOD_RES (16)..(16): Pegylation
  MOD_RES (27)..(27): Xaa is Met, Leu or Nle
HSQGTFTSDYSKYLDCRRAQDFVQWLXDT

SEQ ID NO: 815 - protein, 29 aa, Artificial Sequence
  Glucagon analogue
  MOD_RES (17)..(17): Pegylation
  MOD_RES (27)..(27): Xaa is Met, Leu or Nle
HSQGTFTSDYSKYLDSCRAQDFVQWLXDT

SEQ ID NO: 816 - protein, 29 aa, Artificial Sequence
  Glucagon analogue
  MOD_RES (21)..(21): Pegylation
  MOD_RES (27)..(27): Xaa is Met, Leu or Nle
HSQGTFTSDYSKYLDSRRAQCFVQWLXDT

SEQ ID NO: 817 - protein, 29 aa, Artificial Sequence
  Glucagon analogue
  MOD_RES (24)..(24): Pegylation
  MOD_RES (27)..(27): Xaa is Met, Leu or Nle
HSQGTFTSDYSKYLDSRRAQDFVCWLXDT

SEQ ID NO: 818 - protein, 29 aa, Artificial Sequence
  Glucagon analogue
  MOD_RES (21)..(21): Pegylation
  MOD_RES (27)..(27): Xaa is Met, Leu or Nle
HSQGTFTSDYSRYLDSRRAQKFVQWLXDT

SEQ ID NO: 819 - protein, 29 aa, Artificial Sequence
  Glucagon analogue
  MOD_RES (24)..(24): Pegylation
  MOD_RES (27)..(27): Xaa is Met, Leu or Nle
HSQGTFTSDYSRYLDSRRAQDFVKWLXDT

SEQ ID NO: 820 - protein, 10 aa, Artificial Sequence
  Synthetic peptide
  MISC_FEATURE: Peptide fragment representing carboxy terminal 10 amino acids of Exendin-4
GPSSGAPPPS

SEQ ID NO: 821 - protein, 8 aa, Artificial Sequence
  Synthetic peptide
  MISC_FEATURE: Peptide fragment representing the carboxy terminal 8 amino acids of oxyntomodulin
KRNRNNIA

SEQ ID NO: 822 - protein, 4 aa, Artificial Sequence
  Synthetic peptide
  MISC_FEATURE: Peptide fragment representing the amino 4 amino acids of oxyntomodulin carboxy terminus of SEQ ID NO: 21
KRNR

SEQ ID NO: 823 - protein, 10 aa, Artificial Sequence
  Synthetic peptide
  MISC_FEATURE: Peptide fragment representing the carboxy terminal 10 amino acids of Exendin-4
  MOD_RES (10)..(10): AMIDATION
GPSSGAPPPS

SEQ ID NO: 824 - protein, 39 aa, Artificial Sequence
  Glucagon analogue
HSQGTFTSDYSKYLDSRRAQDFVQWLMDTGPSSGAPPPS

SEQ ID NO: 825 - protein, 37 aa, Artificial Sequence
  Glucagon analogue
HSQGTFTSDYSKYLDSRRAQDFVQWLMDTKRNRNNIA

SEQ ID NO: 826 - protein, 33 aa, Artificial Sequence
  Glucagon analogue
HSQGTFTSDYSKYLDSRRAQDFVQWLMDTKRNR

SEQ ID NO: 827 - protein, 29 aa, Artificial Sequence
  Glucagon analogue
HSQGTFTSDYSKYLDSCRAQDFVQWLMNT

SEQ ID NO: 828 - protein, 39 aa, Artificial Sequence; identical to SEQ ID NO: 36
  Synthetic peptide

SEQ ID NO: 829 - protein, 29 aa, Artificial Sequence
  Glucagon analogue
  MOD_RES (24)..(24): 2-butyrolactone bound through Cys thiol group
HSQGTFTSDYSKYLDSRRAQDFVQWLMNT

SEQ ID NO: 830 - protein, 29 aa, Artificial Sequence
  Glucagon analogue
  MOD_RES (24)..(24): Carboxymethyl group bound through Cys thiol group
HSQGTFTSDYSKYLDSRRAQDFVQWLMNT

SEQ ID NO: 831 - protein, 39 aa, Artificial Sequence; identical to SEQ ID NO: 36
  Glucagon analogue

SEQ ID NO: 832 - protein, 30 aa, Artificial Sequence
  Glucagon analog
  MOD_RES (30)..(30): Xaa is Asp, Glu, Lys, Arg or His
HSQGTFTSDYSKYLDSRRAQDFVQWLMDTX

SEQ ID NO: 833 - protein, 29 aa, Artificial Sequence
  Glucagon analogue
  MOD_RES (15)..(15): Xaa is Asp, Glu, cysteic acid, homoglutamic acid or homocysteic acid
  MOD_RES (27)..(27): Xaa is Met, Leu or Nle
  MOD_RES (28)..(28): Xaa is Asn, Lys, Arg, His, Asp or Glu
  MOD_RES (29)..(29): Xaa is Thr, Lys, Arg, His, Asp or Glu
HSQGTFTSDYSKYLXSRRAQDFVQWLXXX

SEQ ID NO: 834 - protein, 29 aa, Artificial Sequence
  Glucagon analogue
  MOD_RES (15)..(15): Xaa is Asp, Glu, cysteic acid, homoglutamic acid or homocysteic acid
  MOD_RES (27)..(27): Xaa is Met, Leu or Nle
  MOD_RES (28)..(28): Xaa is Asn or an acidic amino acid
  MOD_RES (29)..(29): Xaa is Thr or an acidic amino acid
HSQGTFTSDYSKYLXSRRAQDFVQWLXXX

SEQ ID NO: 835 - protein, 39 aa, Artificial Sequence
  Synthetic peptide
HSQGTFTSDYSKYLDSRRAQDFVQWLMETGPSSGAPPPS

SEQ ID NO: 836 - protein, 37 aa, Artificial Sequence
  Glucagon analogue
HSQGTFTSDYSKYLDSRRAQDFVQWLMETKRNRNNIA

SEQ ID NO: 837 - protein, 33 aa, Artificial Sequence
  Glucagon analogue
HSQGTFTSDYSKYLDSRRAQDFVQWLMETKRNR

SEQ ID NO: 838 - protein, 29 aa, Artificial Sequence
  Glucagon analogue
HSQGTFTSDYSKYLDSRRAQDFVQWLMET

SEQ ID NO: 839 - protein, 27 aa, Artificial Sequence
  Synthetic peptide
  MOD_RES (2)..(2): Xaa is Ser, D-Ser, Ala, D-Ala, Gly, N-methyl-Ser, Aib, Val, or alpha-amino-N-butyric acid
  MOD_RES (27)..(27): Met comprises Z
HXQGTFTSDYSKYLDSRRAQDFVQWLM

SEQ ID NO: 840 - protein, 29 aa, Artificial Sequence
  Synthetic peptide
  MOD_RES (1)..(1): Xaa is alpha, alpha-dimethyl imidiazole acetic acid (DMIA)
  MISC_FEATURE (16)..(20): Lactam bridge between residues 16 and 20
  MOD_RES (24)..(24): Pegylation
XSQGTFTSDYSKYLDERRAKDFVCWLMNT

SEQ ID NO: 841 - protein, 29 aa, Artificial Sequence
  Synthetic peptide
  MOD_RES (1)..(1): Xaa is alpha, alpha-dimethyl imidiazole acetic acid (DMIA)
  MISC_FEATURE (16)..(20): Lactam bridge between residues 16 and 20
  MOD_RES (24)..(24): Glutamine to alanine mutation
  MOD_RES (29)..(29): Pegylation
XSQGTFTSDYSKYLDERRAKDFVAWLMNC

SEQ ID NO: 842 - protein, 29 aa, Artificial Sequence
  Synthetic peptide
  MOD_RES (1)..(1): Xaa is alpha, alpha-dimethyl imidiazole acetic acid (DMIA)
  MISC_FEATURE (16)..(20): Lactam bridge between residues 16 and 20
  MOD_RES (24)..(24): Pegylation
  MOD_RES (27)..(27): Xaa is Nle or Leu
XSQGTFTSDYSKYLDERRAKDFVCWLXNT

SEQ ID NO: 843 - protein, 29 aa, Artificial Sequence
  Synthetic peptide
  MOD_RES (1)..(1): Xaa is alpha, alpha-dimethyl imidiazole acetic acid (DMIA)
  MISC_FEATURE (16)..(20): Lactam bridge between residues 16 and 20
  MISC_FEATURE (24)..(24): Glutamine to alanine mutation
  MISC_FEATURE (27)..(27): Xaa is Nle or Leu
  MOD_RES (29)..(29): Pegylation
XSQGTFTSDYSKYLDERRAKDFVAWLXNC

SEQ ID NO: 844 - protein, 29 aa, Artificial Sequence
  Synthetic peptide
  MISC_FEATURE: SEQ ID NO: 1 with  Ala 20, Ala 24, Nle 27, and Asp 28
  MOD_RES (27)..(27): Xaa is Nle
HSQGTFTSDYSKYLDSRRAADFVAWLXDT

SEQ ID NO: 845 - protein, 29 aa, Artificial Sequence
  Synthetic peptide
  MISC_FEATURE: SEQ ID NO: 1 with Ala 20, Ala 24, Nle27 , Asp 28, and Glu 29
  MOD_RES (27)..(27): Xaa is Nle
HSQGTFTSDYSKYLDSRRAADFVAWLXDE

SEQ ID NO: 846 - protein, 30 aa, Artificial Sequence
  Synthetic peptide
  MISC_FEATURE: SEQ ID NO: 1 with Ala 20, Ala 24, Nle 27, Asp 28, and Glu 30
  MOD_RES (27)..(27): Xaa is Nle
HSQGTFTSDYSKYLDSRRAADFVAWLXDTE

SEQ ID NO: 847 - protein, 29 aa, Artificial Sequence
  Synthetic peptide
  MISC_FEATURE: SEQ ID NO: 1 with Ala 20, Ala 24, Nle 27, Glu 28, and Glu 29
  MOD_RES (27)..(27): Xaa is Nle
HSQGTFTSDYSKYLDSRRAADFVAWLXEE

SEQ ID NO: 848 - protein, 30 aa, Artificial Sequence
  Synthetic peptide
  MISC_FEATURE: SEQ ID NO: 1 with Ala 20, Ala 24, Nle 27, Glu 28, and Glu 30
  MOD_RES (27)..(27): Xaa is Nle
HSQGTFTSDYSKYLDSRRAADFVAWLXETE

SEQ ID NO: 849 - protein, 30 aa, Artificial Sequence
  Synthetic peptide
  MOD_RES (27)..(27): Xaa is Nle
  MISC_FEATURE (27)..(27): SEQ ID NO: 1 with Ala 20, Ala 24, Nle 27, Glu 29, and Glu 30
HSQGTFTSDYSKYLDSRRAADFVAWLXNEE

SEQ ID NO: 850 - protein, 29 aa, Artificial Sequence
  Synthetic peptide
  MISC_FEATURE: SEQ ID NO: 1 with Ala 20, Glu 21, Ala 24, Nle 27, and Asp 28
  MOD_RES (27)..(27): Xaa is Nle
HSQGTFTSDYSKYLDSRRAAEFVAWLXDT

SEQ ID NO: 851 - protein, 29 aa, Artificial Sequence
  Synthetic peptide
  MISC_FEATURE: SEQ ID NO: 1 with Ala 20, Glu 21, Ala 24, Nle 27, Asp 28, and Glu 29
  MOD_RES (27)..(27): Xaa is Nle
HSQGTFTSDYSKYLDSRRAAEFVAWLXDE

SEQ ID NO: 852 - protein, 29 aa, Artificial Sequence
  Synthetic peptide
  MISC_FEATURE: SEQ ID NO: 1 with Ala 20, Glu 21, Ala 24, Nle 27, Asp 28, and Glu 30
  MOD_RES (27)..(27): Xaa is Nle
HSQGTFTSDYSKYLDSRRAAEFVAWLXDE

SEQ ID NO: 853 - protein, 29 aa, Artificial Sequence
  Synthetic peptide
  MISC_FEATURE: SEQ ID NO :1 with Ala 20, Glu 21, Ala 24, Nle 27, Glu 28, and Glu 29
  MOD_RES (27)..(27): Xaa is Nle
HSQGTFTSDYSKYLDSRRAAEFVAWLXEE

SEQ ID NO: 854 - protein, 29 aa, Artificial Sequence
  Synthetic peptide
  MISC_FEATURE: SEQ ID NO: 1 with Ala 20, Glu 21, Ala 24, Nle 27, Glu 28, and Glu 30
HSQGTFTSDYSKYLDSRRAQDFVQWLMNT

SEQ ID NO: 855 - protein, 30 aa, Artificial Sequence
  Synthetic peptide
  MISC_FEATURE: SEQ ID NO: 1 with Ala 20, Glu 21, Ala 24, Nle 27, Glu 29, and Glu 30
  MOD_RES (27)..(27): Xaa is Nle
HSQGTFTSDYSKYLDSRRAAEFVAWLXNEE

SEQ ID NO: 856 - protein, 29 aa, Artificial Sequence
  Synthetic peptide
  MISC_FEATURE: SEQ ID NO: 1 with Thr 16, Ala 20, Glu 21, Ala 24, Nle 27, Asp 28, and Glu29
  MOD_RES (27)..(27): Xaa is Nle
HSQGTFTSDYSKYLDTRRAAEFVAWLXDE

SEQ ID NO: 857 - protein, 31 aa, Homo sapiens; identical to SEQ ID NO: 50

SEQ ID NO: 858 - protein, 30 aa, Homo sapiens; identical to SEQ ID NO: 52
  MOD_RES (30)..(30): AMIDATION

SEQ ID NO: 859 - protein, 29 aa, Artificial Sequence
  Synthetic peptide
  MOD_RES (3)..(3): Xaa is Glutamine analog
  MOD_RES (27)..(27): Xaa is Nle
HSXGTFTSDYSKYLDTRRAAEFVAWLXDE

SEQ ID NO: 860 - protein, 29 aa, Artificial Sequence
  Synthetic peptide
  MOD_RES (3)..(3): Xaa is Glutamine analog
  MOD_RES (16)..(16): Xaa is Aminoisobutryic acid
HSXGTFTSDYSKYLDXRRAADFVAWLMDE

SEQ ID NO: 861 - protein, 29 aa, Artificial Sequence
  Synthetic peptide
  MOD_RES (27)..(27): Xaa is Nle
HSQGTFTSDYSKYLDTRRAAEFVAWLXDE

SEQ ID NO: 862 - protein, 29 aa, Artificial Sequence
  Synthetic peptide
  MOD_RES (3)..(3): Xaa is Acetamidomethyl-cysteine
  MOD_RES (27)..(27): Xaa is Nle
HSXGTFTSDYSKYLDTRRAAEFVAWLXDE

SEQ ID NO: 863 - protein, 29 aa, Artificial Sequence
  Synethic peptide
  MOD_RES (3)..(3): Xaa is Acetyldiaminobutanoic acid
  MOD_RES (27)..(27): Xaa is Nle
HSXGTFTSDYSKYLDTRRAAEFVAWLXDE

SEQ ID NO: 864 - protein, 29 aa, Artificial Sequence
  Synthetic peptide
  MOD_RES (3)..(3): Xaa is Carbamoyldiaminopropanoic acid
  MOD_RES (27)..(27): Xaa is Nle
HSXGTFTSDYSKYLDTRRAAEFVAWLXDE

SEQ ID NO: 865 - protein, 29 aa, Artificial Sequence
  Synthetic peptide
  MOD_RES (3)..(3): Xaa is Methylglutamine
  MOD_RES (27)..(27): Xaa is Nle
HSXGTFTSDYSKYLDTRRAAEFVAWLXDE

SEQ ID NO: 866 - protein, 29 aa, Artificial Sequence
  Synthetic peptide
  MOD_RES (3)..(3): Xaa is Methionine sulfoxide
  MOD_RES (27)..(27): Xaa is Nle
HSXGTFTSDYSKYLDTRRAAEFVAWLXDE

SEQ ID NO: 867 - protein, 29 aa, Artificial Sequence
  Synthetic peptide
  MOD_RES (3)..(3): Xaa is Acetylornithine
  MOD_RES (27)..(27): Xaa is Nle
HSXGTFTSDYSKYLDTRRAAEFVAWLXDE

SEQ ID NO: 868 - protein, 29 aa, Artificial Sequence
  Synthetic peptide
  MOD_RES (16)..(16): Xaa is Aminoisobutryic acid
HSQGTFTSDYSKYLDXRRAADFVAWLMDE

SEQ ID NO: 869 - protein, 29 aa, Artificial Sequence
  Synthetic peptide
  MOD_RES (3)..(3): Xaa is Acetyldiaminobutanoic acid
  MOD_RES (16)..(16): Xaa is Aminoisobutryic acid
HSXGTFTSDYSKYLDXRRAADFVAWLMDE

SEQ ID NO: 870 - protein, 29 aa, Artificial Sequence
  Synthetic peptide
  MOD_RES (3)..(3): Xaa is Methylglutamine
  MOD_RES (16)..(16): Xaa is Aib
HSXGTFTSDYSKYLDXRRAADFVAWLMDE

SEQ ID NO: 871 - protein, 29 aa, Artificial Sequence
  Synthetic peptide
  MOD_RES (3)..(3): Xaa is acetyldiaminobutanoic acid
  MOD_RES (16)..(16): Xaa is Aib
HSXGTFTSDYSKYLDXRRAADFVAWLLDE

SEQ ID NO: 872 - protein, 39 aa, Artificial Sequence; identical to SEQ ID NO: 604
  Synthetic peptide
  MOD_RES (3)..(3): Xaa is Acetyldiaminobutanoic acid
  MOD_RES (16)..(16): Aminoisobutryic Acid
  MOD_RES (39)..(39): AMIDATION

SEQ ID NO: 873 - protein, 29 aa, Artificial Sequence
  Synthetic peptide
  MOD_RES (3)..(3): Xaa is Acetyldiaminobutanoic acid
  MOD_RES (16)..(16): Xaa is Aminoisobutryric acid
HSXGTFTSDYSKYLDXRRASDFVSWLLDE

SEQ ID NO: 874 - protein, 29 aa, Artificial Sequence
  Synthetic peptide
  MOD_RES (3)..(3): Xaa is Acetyldiaminobutanoic acid
  MOD_RES (16)..(16): Xaa is Aminoisobutryic acid
HSXGTFTSDYSKYLDXRRATDFVTWLLDE

SEQ ID NO: 875 - protein, 29 aa, Artificial Sequence
  Synthetic peptide
HSQGTFTSDYSKYLDSRRAQDFVQWLMDE

SEQ ID NO: 876 - protein, 29 aa, Artificial Sequence
  Synthetic peptide
  MOD_RES (16)..(16): Xaa is Aib
HSQGTFTSDYSKYLDXRRAQDFVQWLMDE

SEQ ID NO: 877 - protein, 29 aa, Artificial Sequence
  Synthetic peptide
  misc_feature (3)..(3): Xaa can be any naturally occurring amino acid
HSXGTFTSDYSKYLDSRRAQDFVQWLMNT

SEQ ID NO: 878 - protein, 29 aa, Artificial Sequence
  Synthetic peptide
HSQGTFTSDYSKYLDSRRAQDFVQWLMDT

SEQ ID NO: 879 - protein, 30 aa, Artificial Sequence; identical to SEQ ID NO: 581
  Synthetic peptide
  MOD_RES (2)..(2): Xaa is d-Ser
  MOD_RES (30)..(30): Acylated with a C14 fatty acyl group
  MOD_RES (30)..(30): AMIDATION

SEQ ID NO: 880 - protein, 29 aa, Artificial Sequence
  Synthetic peptide
  MOD_RES (2)..(2): Xaa is d-Ser
  MOD_RES (10)..(10): Acylated with a C14 fatty acyl group
  MOD_RES (29)..(29): AMIDATION
HXQGTFTSDKSKYLDERRAKDFVQWLMNT

SEQ ID NO: 881 - protein, 30 aa, Artificial Sequence; identical to SEQ ID NO: 581
  Synthetic peptide
  MOD_RES (2)..(2): Xaa is d-Ser
  MOD_RES (30)..(30): Acylated with a C16 fatty acyl group
  MOD_RES (30)..(30): AMIDATION

SEQ ID NO: 882 - protein, 29 aa, Artificial Sequence
  Synthetic peptide
  MOD_RES (2)..(2): Xaa is d-Ser
  MOD_RES (10)..(10): Acylated with a C16 fatty acyl group
  MOD_RES (29)..(29): AMIDATION
HXQGTFTSDKSKYLDERRAKDFVQWLMNT

SEQ ID NO: 883 - protein, 29 aa, Artificial Sequence
  Synthetic peptide
  MOD_RES (2)..(2): Aminoisobutryic Acid
  MOD_RES (10)..(10): Acylated with a C18 fatty acyl group
  MOD_RES (24)..(24): Cys-PEG
  MOD_RES (29)..(29): AMIDATION
HXQGTFTSDKSKYLDEQAAKEFICWLMNT

SEQ ID NO: 884 - protein, 30 aa, Artificial Sequence; identical to SEQ ID NO: 586
  Synthetic peptide
  MOD_RES (2)..(2): Aminoisobutryic Acid
  MOD_RES (24)..(24): Cys-PEG
  MOD_RES (30)..(30): Acylated with a C18 fatty acyl group
  MOD_RES (30)..(30): AMIDATION

SEQ ID NO: 885 - protein, 29 aa, Artificial sequence
  Synthetic peptide
  MOD_RES (16)..(16): Xaa is Ser or alpha, alpha-disubstituted amino acid
  MOD_RES (20)..(20): Xaa is Gln or alpha, alpha-disubstituted amino acid
  MOD_RES (21)..(21): Xaa is Asp or alpha, alpha-disubstituted amino acid
  MOD_RES (24)..(24): Xaa is Gln or alpha, alpha-disubstituted amino acid
HSQGTFTSDYSKYLDXRRAXXFVXWLMNT

SEQ ID NO: 886 - protein, 29 aa, Artificial Sequence
  Synthetic peptide
  MOD_RES (16)..(16): Xaa is Aib
HSQGTFTSDYSKYLDXRRAQDFVQWLMNT

SEQ ID NO: 887 - protein, 29 aa, Artificial Sequence
  Synthetic peptide
  MOD_RES (19)..(19): Xaa is Aib
HSQGTFTSDYSKYLDSRRXQDFVQWLMNT

SEQ ID NO: 888 - protein, 29 aa, Artificial Sequence
  Synthetic peptide
  MOD_RES (20)..(20): Xaa is Aib
HSQGTFTSDYSKYLDSRRAXDFVQWLMNT

SEQ ID NO: 889 - protein, 29 aa, Artificial Sequence
  Synthetic peptide
  MOD_RES (21)..(21): Xaa is Aib
HSQGTFTSDYSKYLDSRRAQXFVQWLMNT

SEQ ID NO: 890 - protein, 29 aa, Artificial Sequence
  Synthetic peptide
  MOD_RES (24)..(24): Xaa is Aib
HSQGTFTSDYSKYLDSRRAQDFVXWLMNT

SEQ ID NO: 891 - protein, 29 aa, Artificial Sequence
  Synthetic peptide
  MOD_RES (16)..(16): Xaa is Aib
  MOD_RES (20)..(20): Xaa is Aib
HSQGTFTSDYSKYLDXRRAXDFVQWLMNT

SEQ ID NO: 892 - protein, 29 aa, Artificial Sequence
  Synthetic peptide
  MOD_RES (16)..(16): Xaa is Aib
  MOD_RES (24)..(24): Xaa is Aib
HSQGTFTSDYSKYLDXRRAQDFVXWLMNT

SEQ ID NO: 893 - protein, 29 aa, Artificial Sequence
  Synthetic peptide
  MOD_RES (20)..(20): Xaa is Aib
  MOD_RES (24)..(24): Xaa is Aib
HSQGTFTSDYSKYLDSRRAXDFVXWLMNT

SEQ ID NO: 894 - protein, 29 aa, Artificial Sequence
  Synthetic peptide
  MOD_RES (16)..(16): Xaa is Aib
  MOD_RES (20)..(20): Xaa is Aib
  MOD_RES (24)..(24): Xaa is Aib
HSQGTFTSDYSKYLDXRRAXDFVXWLMNT

SEQ ID NO: 895 - protein, 29 aa, Artificial Sequence
  Synthetic peptide
  MOD_RES (2)..(2): Xaa is Aib
  MOD_RES (16)..(16): Xaa is Aib
  MOD_RES (29)..(29): AMIDATION
HXQGTFTSDKSKYLDXRRAQDFVQWLMNT

SEQ ID NO: 896 - protein, 29 aa, Artificial Sequence
  Synthetic peptide
  MOD_RES (2)..(2): Xaa is Aib
  MOD_RES (16)..(16): Xaa is Aib
  MOD_RES (29)..(29): AMIDATION
HXQGTFTSDYSKYLDXRRAQDFVQWLMNT

SEQ ID NO: 897 - protein, 29 aa, Artificial Sequence
  Synthetic peptide
  MOD_RES (2)..(2): Xaa is Aib
  MOD_RES (10)..(10): Acylated with a C16 fatty acyl group
  MOD_RES (16)..(16): Xaa is Aib
  MOD_RES (29)..(29): AMIDATION
HXQGTFTSDKSKYLDXRRAQDFVQWLMNT

SEQ ID NO: 898 - protein, 29 aa, Artificial Sequence
  Synthetic peptide
  MOD_RES (2)..(2): Xaa is Aib
  MOD_RES (10)..(10): Acylated with a C16 fatty acyl group via Ala-Ala spacer
  MOD_RES (16)..(16): Xaa is Aib
  MOD_RES (29)..(29): AMIDATION
HXQGTFTSDKSKYLDXRRAQDFVQWLMNT

SEQ ID NO: 899 - protein, 29 aa, Artificial Sequence
  Synthetic peptide
  MOD_RES (2)..(2): Xaa is Aib
  MOD_RES (10)..(10): Acylated with a C16 fatty acyl group via dipeptide spacer
  MOD_RES (16)..(16): Xaa is Aib
  MOD_RES (29)..(29): AMIDATION
HXQGTFTSDKSKYLDXRRAQDFVQWLMNT

SEQ ID NO: 900 - protein, 29 aa, Artificial Sequence
  Synthetic peptide
  MOD_RES (2)..(2): Xaa is Aib
  MOD_RES (10)..(10): Acylated with a C16 fatty acyl group via beta-Ala-beta-Ala spacer
  MOD_RES (16)..(16): Xaa is Aib
  MOD_RES (29)..(29): AMIDATION
HXQGTFTSDKSKYLDXRRAQDFVQWLMNT

SEQ ID NO: 901 - protein, 29 aa, Artificial Sequence
  Synthetic peptide
  MOD_RES (2)..(2): Xaa is Aib
  MOD_RES (10)..(10): Acylated with a C16 fatty acyl group via 6-aminohexanoic acid spacer
  MOD_RES (16)..(16): Xaa is Aib
  MOD_RES (29)..(29): AMIDATION
HXQGTFTSDKSKYLDXRRAQDFVQWLMNT

SEQ ID NO: 902 - protein, 29 aa, Artificial Sequence
  Synthetic peptide
  MOD_RES (2)..(2): Xaa is Aib
  MOD_RES (10)..(10): Acylated with a C16 fatty acyl group via Leu-Leu spacer
  MOD_RES (16)..(16): Xaa is Aib
  MOD_RES (29)..(29): AMIDATION
HXQGTFTSDKSKYLDXRRAQDFVQWLMNT

SEQ ID NO: 903 - protein, 29 aa, Artificial Sequence
  Synthetic peptide
  MOD_RES (2)..(2): Xaa is Aib
  MOD_RES (10)..(10): Acylated with a C16 fatty acyl group via Pro-Pro spacer
  MOD_RES (16)..(16): Xaa is Aib
  MOD_RES (29)..(29): AMIDATION
HXQGTFTSDKSKYLDXRRAQDFVQWLMNT

SEQ ID NO: 904 - protein, 29 aa, Artificial Sequence
  Synthetic peptide
  MOD_RES (2)..(2): Xaa is Aib
  MOD_RES (10)..(10): Acylated with a C14 fatty acyl group
  MOD_RES (16)..(16): Xaa is Aib
  MOD_RES (24)..(24): Cys-PEG
  MOD_RES (29)..(29): AMIDATION
HXQGTFTSDKSKYLDXRRAQDFVCWLMNT

SEQ ID NO: 905 - protein, 29 aa, Artificial Sequence
  Synthetic peptide
  MOD_RES (2)..(2): Xaa is Aib
  MOD_RES (10)..(10): Acylated with a C14 fatty acyl group via dipeptide spacer
  MOD_RES (16)..(16): Xaa is Aib
  MOD_RES (24)..(24): Cys-PEG
  MOD_RES (29)..(29): AMIDATION
HXQGTFTSDKSKYLDXRRAQDFVCWLMNT

SEQ ID NO: 906 - protein, 29 aa, Artificial Sequence
  Synthetic peptide
  MOD_RES (2)..(2): Xaa is Aib
  MOD_RES (10)..(10): Acylated with a C14 fatty acyl group via dipeptide spacer
  MOD_RES (16)..(16): Xaa is Aib
  MOD_RES (29)..(29): AMIDATION
HXQGTFTSDKSKYLDXRRAQDFVQWLMNT

SEQ ID NO: 907 - protein, 29 aa, Artificial Sequence
  Synthetic peptide
  MOD_RES (2)..(2): Xaa is Aib
  MOD_RES (10)..(10): Acylated with a C14 fatty acyl group via Ala-Ala spacer
  MOD_RES (16)..(16): Xaa is Aib
  MOD_RES (24)..(24): Cys-PEG
  MOD_RES (29)..(29): AMIDATION
HXQGTFTSDKSKYLDXRRAQDFVCWLMNT

SEQ ID NO: 908 - protein, 29 aa, Artificial Sequence
  Synthetic peptide
  MOD_RES (2)..(2): Xaa is Aib
  MOD_RES (10)..(10): Acylated with a C14 fatty acyl group via Ala-Ala spacer
  MOD_RES (16)..(16): Xaa is Aib
  MOD_RES (29)..(29): AMIDATION
HXQGTFTSDKSKYLDXRRAQDFVQWLMNT

SEQ ID NO: 909 - protein, 29 aa, Artificial Sequence
  Synthetic peptide
  MOD_RES (2)..(2): Xaa is Aib
  MOD_RES (10)..(10): Acylated with a C16 fatty acyl group via Ala-Ala spacer
  MOD_RES (16)..(16): Xaa is Aib
  MOD_RES (24)..(24): Cys-PEG
  MOD_RES (29)..(29): AMIDATION
HXQGTFTSDKSKYLDXRRAQDFVCWLMNT

SEQ ID NO: 910 - protein, 29 aa, Artificial Sequence
  Synthetic peptide
  MOD_RES (2)..(2): Xaa is Aib
  MOD_RES (10)..(10): Acylated with a C16 fatty acyl group via dipeptide spacer
  MOD_RES (16)..(16): Xaa is Aib
  MOD_RES (24)..(24): Cys-PEG
  MOD_RES (29)..(29): AMIDATION
HXQGTFTSDKSKYLDXRRAQDFVCWLMNT

SEQ ID NO: 911 - protein, 29 aa, Artificial Sequence
  Synthetic peptide
  MOD_RES (2)..(2): Xaa is Aib
  MOD_RES (10)..(10): Covalently bound to a C14 fatty acyl group
  MOD_RES (16)..(16): Xaa is Aib
  MOD_RES (29)..(29): AMIDATION
HXQGTFTSDKSKYLDXRRAQDFVCWLMNT

SEQ ID NO: 912 - protein, 29 aa, Artificial Sequence
  Synthetic peptide
  MOD_RES (2)..(2): Xaa is Aib
  MOD_RES (10)..(10): Covalently bound to C14 fatty acyl group via dipeptide spacer
  MOD_RES (16)..(16): Xaa is Aib
  MOD_RES (29)..(29): AMIDATION
HXQGTFTSDKSKYLDXRRAQDFVCWLMNT

SEQ ID NO: 913 - protein, 29 aa, Artificial Sequence
  Synthetic peptide
  MOD_RES (2)..(2): Xaa is Aib
  MOD_RES (10)..(10): Covalently bound to C14 fatty acyl group via Ala-Ala spacer
  MOD_RES (16)..(16): Xaa is Aib
  MOD_RES (29)..(29): AMIDATION
HXQGTFTSDKSKYLDXRRAQDFVCWLMNT

SEQ ID NO: 914 - protein, 29 aa, Artificial Sequence
  Synthetic peptide
  MOD_RES (2)..(2): Xaa is Aib
  MOD_RES (10)..(10): Covalently bound to C16 fatty acyl group via dipeptide spacer
  MOD_RES (16)..(16): Xaa is Aib
  MOD_RES (29)..(29): AMIDATION
HXQGTFTSDKSKYLDXRRAQDFVCWLMNT

SEQ ID NO: 915 - protein, 29 aa, Artificial Sequence
  Synthetic peptide
  MOD_RES (2)..(2): Xaa is Aib
  MOD_RES (10)..(10): Covelently bound to C16 fatty acyl group via Ala-Ala spacer
  MOD_RES (16)..(16): Xaa is Aib
  MOD_RES (29)..(29): AMIDATION
HXQGTFTSDKSKYLDXRRAQDFVCWLMNT

SEQ ID NO: 916 - protein, 30 aa, Artificial Sequence; identical to SEQ ID NO: 581
  Synthetic peptide
  MOD_RES (2)..(2): D-serine, D-alanine, valine, amino n-butyric acid, glycine, N-methyl serine, aminoisobutyric acid
  MOD_RES (30)..(30): Acylated with a C14 fatty acyl group
  MOD_RES (30)..(30): AMIDATION

SEQ ID NO: 917 - protein, 29 aa, Artificial Sequence
  Synthetic peptide
  MOD_RES (2)..(2): D-serine, D-alanine, valine, amino n-butyric acid, glycine, N-methyl serine, aminoisobutyric acid
  MOD_RES (10)..(10): Acylated with a C14 fatty acyl group
  MOD_RES (29)..(29): AMIDATION
HXQGTFTSDKSKYLDERRAKDFVQWLMNT

SEQ ID NO: 918 - protein, 30 aa, Artificial Sequence; identical to SEQ ID NO: 581
  Synthetic peptide
  MOD_RES (2)..(2): D-serine, D-alanine, valine, amino n-butyric acid, glycine, N-methyl serine, aminoisobutyric acid
  MOD_RES (30)..(30): Acylated with a C16 fatty acyl group
  MOD_RES (30)..(30): AMIDATION

SEQ ID NO: 919 - protein, 29 aa, Artificial Sequence
  Synthetic peptide
  MOD_RES (2)..(2): D-serine, D-alanine, valine, amino n-butyric acid, glycine, N-methyl serine, aminoisobutyric acid
  MOD_RES (10)..(10): Acylated with a C16 fatty acyl group
  MOD_RES (29)..(29): AMIDATION
HXQGTFTSDKSKYLDERRAKDFVQWLMNT

SEQ ID NO: 920 - protein, 29 aa, Artificial Sequence
  Synthetic peptide
  MOD_RES (1)..(1): Xaa at position 1 is His, D-His, N-methyl-His, alpha-methyl-His, imidazole acetic acid, des-amino-His, hydroxyl-His, acetyl-His, homo-His, or alpha, alpha-dimethyl imidiazole acetic acid (DMIA)
  MOD_RES (2)..(2): Xaa at position 2 is Ser, D-Ser, Ala, D-Ala, Gly, N-methyl-Ser, AIB, Val, or alpha-amino-N-butyric acid
  MOD_RES (3)..(3): Xaa at position 3 is a glutamine analog having the structure of Formula I, II or II
  MOD_RES (12)..(12): Xaa at position 12 is lysine or arginine
  MOD_RES (15)..(15): Xaa at position 15 is Asp, Glu, cysteic acid, homoglutamic acid or homocysteic acid;
  MOD_RES (16)..(16): Xaa at position 16 is Ser, glutamine, homoglutamic acid, homocysteic acid, Thr or Aib
  MOD_RES (21)..(21): Xaa at position 21 is Asp, Lys, Cys, Orn, homocysteine or acetyl phenylalanine
  MOD_RES (24)..(24): Xaa at position 24 is Gln, Lys, Cys, Orn, homocysteine or acetyl phenylalanine
  MOD_RES (27)..(27): Xaa at position 27 is Met, Leu or Nle
  MOD_RES (28)..(28): Xaa at position 28 is Asn, Lys, Arg, His, Asp or Glu
  MOD_RES (29)..(29): Xaa at position 29 is Thr, Lys, Arg, His, Gly, Asp or Glu
XXXGTFTSDYSXYLXXRRAQXFVXWLXXX

SEQ ID NO: 921 - protein, 29 aa, Artificial Sequence
  Synthetic peptide
  MOD_RES (2)..(2): Xaa at position 2 is Ser, D-Ser, Ala, D-Ala, Gly, N-methyl-Ser, AIB, Val, or alpha-amino-N-butyric acid
  MOD_RES (12)..(12): Xaa at position 12 is lysine or arginine
  MOD_RES (15)..(15): Xaa at position 15 is Asp or Glu
  MOD_RES (16)..(16): Xaa at position 16 is Ser, Thr or Aib
  MOD_RES (21)..(21): Xaa at position 21 is Asp, Lys, Cys, Orn, homocysteine or acetyl phenylalanine
  MOD_RES (24)..(24): Xaa at position 24 is Gln, Lys, Cys, Orn, homocysteine or acetyl phenylalanine
  MOD_RES (27)..(27): Xaa at position 27 is Met, Leu or Nle
  MOD_RES (28)..(28): Xaa at position 28 is Asn, Lys, Arg, His, Asp or Glu
  MOD_RES (29)..(29): Xaa at position 29 is Thr, Lys, Arg, His, Gly, Asp or Glu
HXQGTFTSDYSXYLXXRRAQXFVXWLXXX

SEQ ID NO: 922 - protein, 29 aa, Artificial Sequence
  Synthetic peptide
  MOD_RES (2)..(2): Xaa at position 2 is Ser, D-Ser, Ala, D-Ala, Gly, N-methyl-Ser, AIB, Val, or alpha-amino-N-butyric acid
  MOD_RES (12)..(12): Xaa at position 12 is lysine or arginine
  MOD_RES (15)..(15): Xaa at position 15 is Asp or Glu
  MOD_RES (16)..(16): Xaa at position 16 is Ser, Thr or Aib
  MOD_RES (27)..(27): Xaa at position 27 is Met, Leu or Nle
  MOD_RES (28)..(28): Xaa at position 28 is Asn, Lys, Arg, His, Asp or Glu
  MOD_RES (29)..(29): Xaa at position 29 is Thr, Lys, Arg, His, Gly, Asp or Glu
HXQGTFTSDYSXYLXXRRAQDFVQWLXXX

SEQ ID NO: 923 - protein, 40 aa, Artificial Sequence
  Synthetic peptide
  MOD_RES (2)..(2): Xaa at position 2 is Ser, D-Ser, Ala, D-Ala, Gly, N-methyl-Ser, AIB, Val, or alpha-amino-N-butyric acid
  MOD_RES (12)..(12): Xaa at position 12 is lysine or arginine
  MOD_RES (15)..(15): Xaa at position 15 is Asp or Glu
  MOD_RES (16)..(16): Xaa at position 16 is Ser, Thr or Aib
  MOD_RES (27)..(27): Xaa at position 27 is Met, Leu or Nle
  MOD_RES (28)..(28): Xaa at position 28 is Asn, Lys, Arg, His, Asp or Glu
  MOD_RES (40)..(40): Xaa at position 40 is Lys or Cys
HXQGTFTSDYSXYLXXRRAQDFVQWLXXGGPSSGAPPPSX

SEQ ID NO: 924 - protein, 40 aa, Artificial Sequence
  Synthetic peptide
  MOD_RES (2)..(2): Xaa at position 2 is Ser, D-Ser, Ala, D-Ala, Gly, N-methyl-Ser, AIB, Val, or alpha-amino-N-butyric acid
  MOD_RES (12)..(12): Xaa at position 12 is lysine or arginine
  MOD_RES (27)..(27): Xaa at position 27 is Met, Leu or Nle
  MOD_RES (28)..(28): Xaa at position 28 is Asn, Lys, Arg, His, Asp or Glu
  MOD_RES (40)..(40): Xaa at position 40 is Lys or Cys
HXQGTFTSDYSXYLDSRRAQDFVQWLXXGGPSSGAPPPSX

SEQ ID NO: 925 - protein, 29 aa, Artificial Sequence
  Synthetic peptide
  MOD_RES (1)..(1): Xaa at position 1 is His, D-His, N-methyl-His, alpha-methyl-His, imidazole acetic acid, des-amino-His, hydroxyl-His, acetyl-His, homo-His, or alpha, alpha-dimethyl imidiazole acetic acid (DMIA)
  MOD_RES (2)..(2): Xaa at position 2 is Ser, D-Ser, Ala, D-Ala, Gly, N-methyl-Ser, AIB, Val, or alpha-amino-N-butyric acid
  MOD_RES (3)..(3): Xaa at position 3 is a glutamine analog having the structure of Formula I, II or III
  MOD_RES (12)..(12): Xaa at position 12 is lysine or arginine
  MOD_RES (15)..(15): Xaa at position 15 is Asp, Glu, cysteic acid, homoglutamic acid or homocysteic acid;
  MOD_RES (21)..(21): Xaa at position 21 is Asp, Lys, Cys, Orn, homocysteine or acetyl phenylalanine
  MOD_RES (24)..(24): Xaa at position 24 is Gln, Lys, Cys, Orn, homocysteine or acetyl phenylalanine
  MOD_RES (27)..(27): Xaa at position 27 is Met, Leu or Nle
  MOD_RES (28)..(28): Xaa at position 28 is Asn, Lys, Arg, His, Asp or Glu
  MOD_RES (29)..(29): Xaa at position 29 is Thr, Lys, Arg, His, Gly, Asp or Glu
XXXGTFTSDYSXYLXSRRAQXFVXWLXXX

SEQ ID NO: 926 - protein, 11 aa, Artificial Sequence
  Synthetic peptide
GPSSGAPPPSK

SEQ ID NO: 927 - protein, 40 aa, Artificial Sequence
  Synthetic peptide
  MOD_RES (1)..(1): Xaa at position 1 is His, D-His, N-methyl-His, alpha-methyl-His, imidazole acetic acid, des-amino-His, hydroxyl-His, acetyl-His, homo-His, or alpha, alpha-dimethyl imidiazole acetic acid (DMIA)
  MOD_RES (2)..(2): Xaa at position 2 is Ser, D-Ser, Ala, D-Ala, Gly, N-methyl-Ser, AIB, Val, or alpha-amino-N-butyric acid
  MOD_RES (15)..(15): Xaa at position 15 is Asp, Glu, cysteic acid, homoglutamic acid or homocysteic acid;
  MOD_RES (16)..(16): Xaa at position 16 is Ser, glutamine, homoglutamic acid, homocysteic acid, Thr or Aib
  MOD_RES (27)..(27): Xaa at position 27 is Met, Leu or Nle
  MOD_RES (28)..(28): Xaa at position 28 is Asn, Lys, Arg, His, Asp or Glu
  MOD_RES (40)..(40): Xaa at position 40 is Lys or Cys
XXQGTFTSDYSKYLXXRRAQDFVQWLXXGGPSSGAPPPSX

SEQ ID NO: 928 - protein, 11 aa, Artificial Sequence
  Synthetic peptide
  MISC_FEATURE: Peptide fragment representing the carboxy terminal 10 amino acids of Exendin-4
  MOD_RES (10)..(10): AMIDATION
GGPSSGAPPPS

SEQ ID NO: 929 - protein, 10 aa, Artificial Sequence
  Synthetic peptide
  MISC_FEATURE: Peptide fragment representing the carboxy terminal 10 amino acids of Exendin-4
  MOD_RES (10)..(10): AMIDATION
GPSSGAPPPK

SEQ ID NO: 930 - protein, 11 aa, Artificial Sequence
  Synthetic peptide
GGPSSGAPPPK

SEQ ID NO: 931 - protein, 12 aa, Artificial Sequence
  Synthetic peptide
  MISC_FEATURE: Peptide fragment representing the carboxy terminal 10 amino acids of Exendin-4
  MOD_RES (10)..(10): AMIDATION
NGGPSSGAPPPS

SEQ ID NO: 932 - protein, 13 aa, Artificial Sequence
  Synthetic peptide
  MISC_FEATURE: Peptide fragment representing the carboxy terminal 10 amino acids of Exendin-4
  MOD_RES (10)..(10): AMIDATION
NGGPSSGAPPPSK

SEQ ID NO: 933 - protein, 30 aa, Artificial Sequence
  Synthetic Glucagon Analogue
  MOD_RES (1)..(1): His, D-His, (Des-amino)His, hydroxyl-His, acetyl-His, homo-His or alpha, alpha-dimethyl imidiazole acetic acid (DMIA), N-methyl His, alpha-methyl His, or imidazole acetic acid
  MOD_RES (2)..(2): Ser, D-Ser, Ala, D-Ala, Val, Gly, N-methyl Ser, AIB or N-methyl Ala
  MOD_RES (3)..(3): Gln, Glu, Orn, Nle of Gln derivative
  misc_feature (10)..(10): Xaa can be any naturally occurring amino acid
  MOD_RES (12)..(12): Lys or Arg
  misc_feature (13)..(13): Xaa can be any naturally occurring amino acid
  MOD_RES (15)..(15): Asp, Glu, cysteic acid, homoglutamic acid and homocysteic acid
  misc_feature (16)..(16): Xaa can be any naturally occurring amino acid
  MOD_RES (21)..(21): Asp, Lys, Cys, Orn, homocystein or acetyl phenyalanine
  misc_feature (22)..(22): Xaa can be any naturally occurring amino acid
  MOD_RES (24)..(24): Gln, Lys, Cys, Orn, homocysteine or acetyl phenyalanine
  misc_feature (25)..(25): Xaa can be any naturally occurring amino acid
  MOD_RES (27)..(27): Met, Leu or Nle
  MOD_RES (28)..(28): Asn, Arg, His, Glu, Lys or Asp
  MOD_RES (29)..(29): Thr, Gly, Lys, Arg, His, Asp or Glu
  misc_feature (30)..(30): Xaa can be any naturally occurring amino acid
XXXGTFTSDXYSXYLXSRRAQXFVXWLXXX

SEQ ID NO: 934 - protein, 40 aa, Homo sapiens
  MISC_FEATURE (2)..(2): Xaa at position 2 is dSer
  MISC_FEATURE (40)..(40): Xaa at position 40 is Lys
HXQGTFTSDYSKYLDSRRAQDFVQWLMNGGPSSGAPPPSX

SEQ ID NO: 935 - protein, 40 aa, Homo sapiens
  MISC_FEATURE (2)..(2): Xaa at position 2 is Aib or dSer
  MISC_FEATURE (40)..(40): Xaa at position 40 is Lys or Cys
HXQGTFTSDYSKYLDSRRAQDFVQWLMNGGPSSGAPPPSK
